(19) United States
(12) Patent Application Publication
(10) Pub. No.: US 2013/0111634 A1
(43) Pub. Date: May 2, 2013

(54) METHODS AND COMPOSITIONS FOR SILENCING GENES USING ARTIFICIAL MICRORNAS

(71) Applicant: E I Du Pont De Nemours And Company And Pion, Wilmington, DE (US)

(72) Inventors: Itzhak Kurek, San Francisco, CA (US); Brian McGonigle, Wilmington, DE (US); Genhai Zhu, San Jose, CA (US)

(73) Assignee: E I Du Pont De Nemours And Company And Pioneer Hi-Bred International, Wilmington, DE (US)

(21) Appl. No.: 13/661,237

(22) Filed: Oct. 26, 2012

Related U.S. Application Data
(60) Provisional application No. 61/552,700, filed on Oct. 28, 2011.

(51) Int. Cl. C12N 15/82; A01H 5/00; A01H 5/10; C12N 5/10

(52) U.S. Cl. 800/298; 435/320.1; 435/419; 435/415; 435/416; 435/412; 435/468

(57) ABSTRACT

Methods and compositions are provided that employ microRNA (miRNA) that, when expressed in a plant cell, is capable of reducing the level of mRNA of a target sequence (i.e. endogenous sequence) without reducing the level of mRNA of one or more closely related sequences. While miRNAs can be designed with specificity for a particular target sequence, the instant application demonstrates that a miRNA can specifically silence a target sequence without silencing a closely related sequence having high sequence identity to the target sequence. In certain embodiments, an endogenous target sequence can be suppressed with a recombinant miRNA expression construct without silencing a recombinant polynucleotide of interest having a sequence closely related to the target sequence. Such methods and compositions employ recombinant miRNA expression constructs which produce a 21-nt miRNA. Transgenic plant cells, plants and seeds incorporating miRNA expression constructs and recombinant polynucleotide constructs comprising polynucleotides of interest are also provided.

### CROSS REFERENCE TO RELATED APPLICATIONS

[0001] This application claims the benefit of U.S. Provisional Application No. 61/552,700, filed Oct. 28, 2011, the entire content of which is herein incorporated by reference.

### FIELD OF THE INVENTION

[0002] The field of the present invention relates generally to plant molecular biology. More specifically, it relates to constructs and methods to reduce the level of expression of a target sequence.

### BACKGROUND OF THE INVENTION

[0003] Biochemists and biotechnologists introduce altered (or shuffled) versions of genes into organisms with the intent to produce a desired phenotype. However, the desired outcome is often not obtained due to the presence of the endogenous gene product that still remains. Thus, there is a desire to replace endogenous genes with altered versions.

[0004] A variety of methods have been used in plants to overcome these problems; unfortunately, such methods have not proven sufficient for replacing endogenous genes with altered versions. For example, traditional RNAi silencing using long DS-RNA has not proven effective because the homology between the endogenous and introduced genes results in silencing of both genes. DS-RNA that targets the promoters of the endogenous genes has shown some promise, but the efficacy of silencing is frequently not sufficient and because the promoter is silenced it is impossible to use the endogenous promoter to express the introduced gene. Thus, methods and compositions are needed in plants to allow an altered version of a gene that encodes a protein with improved characteristics to be expressed while eliminating or reducing the expression of the endogenous version of the gene.

### BRIEF SUMMARY OF THE INVENTION

[0005] Methods and compositions are provided that employ a microRNA (miRNA) that, when expressed in a plant cell, is capable of reducing the level of mRNA of a target sequence (i.e. an endogenous sequence) without reducing the level of mRNA of one or more closely related sequences. While miRNAs can be designed with specificity for a particular target sequence, the instant application demonstrates that a miRNA can specifically silence a target sequence without silencing a closely related sequence having high sequence identity to the target sequence. In certain embodiments, a target sequence (i.e. an endogenous sequence) can be suppressed with a recombinant miRNA expression construct without silencing a recombinant polynucleotide of interest having a sequence closely related to the target sequence. Such methods and compositions employ recombinant miRNA expression constructs which produce a 21-nt miRNA. Transgenic plant cells, plants and seeds incorporating miRNA expression constructs and recombinant polynucleotide constructs comprising polynucleotides of interest are also provided.

### BRIEF DESCRIPTION OF THE DRAWINGS AND SEQUENCES

[0006] FIG. 1 is a diagram of the PHP39309 plasmid.

[0007] FIG. 2 is a diagram of the PHP39307 plasmid.

[0008] FIG. 3 is a diagram of the PHP39308 plasmid.

[0009] FIG. 4 is a diagram of the PHP40973 plasmid.

[0010] FIG. 5 is a diagram of the PHP38464 plasmid.

[0011] FIG. 6 is a diagram of the PHP38463 plasmid.

[0012] FIG. 7 is a diagram of the PHP38465 plasmid.

[0013] FIG. 8 is a diagram of the PHP38462 plasmid.

[0014] The sequence descriptions and Sequence Listing attached hereto comply with the rules governing nucleotide and/or amino acid sequence disclosures in patent applications as set forth in 37 C.F.R. §1.821-1.825. The Sequence Listing contains the one letter code for nucleotide sequence characters and the three letter codes for amino acids as defined in conformity with the IUPAC-IUBMB standards described in Nucleic Acids Res. 13:3021-3030 (1985) and in the Biochemical J. 219 (2):345-373 (1984) which are herein incorporated by reference. The symbols and format used for nucleotide and amino acid sequence data comply with the rules set forth in 37 C.F.R. §1.822.

[0015] SEQ ID NO:1 is the nucleotide sequence of the DNA corresponding to the amiRNA referred to herein as PEPC4A.

[0016] SEQ ID NO:2 is the nucleotide sequence of the DNA corresponding to the amiRNA referred to herein as PEPC4B.

[0017] SEQ ID NO:3 is the nucleotide sequence of the DNA corresponding to the artificial star sequence in the 396h-PEPC4A amiRNA precursor.

[0018] SEQ ID NO:4 is the nucleotide sequence of the DNA corresponding to the artificial star sequence in the 396h-PEPC4b amiRNA precursor.

[0019] SEQ ID NO:5 is the nucleotide sequence of the DNA corresponding to the artificial star sequence in the 169r-PEPC4A amiRNA precursor.

[0020] SEQ ID NO:6 is the nucleotide sequence of the amiRNA precursor 396h-PEPC4A.

[0021] SEQ ID NO:7 is the nucleotide sequence of the amiRNA precursor 396h-PEPC4B.

[0022] SEQ ID NO:8 is the nucleotide sequence of the amiRNA precursor 169r-PEPC4A.

[0023] SEQ ID NO:9 is the nucleotide sequence of the PHP38464 plasmid (FIG. 5).

[0024] SEQ ID NO:10 is the nucleotide sequence of the PHP38463 plasmid (FIG. 6).

[0025] SEQ ID NO:11 is the nucleotide sequence of the PHP38465 plasmid (FIG. 7).

[0026] SEQ ID NO:12 is the nucleotide sequence of the PHP38462 plasmid (FIG. 8).

[0027] SEQ ID NO:13 is the nucleotide sequence of the DNA corresponding to the amiRNA referred to herein as RCA1a.

[0028] SEQ ID NO:14 is the nucleotide sequence of the DNA corresponding to the artificial star sequence in the 396h-RCA1a amiRNA precursor.

[0029] SEQ ID NO:15 is the nucleotide sequence of the DNA corresponding to the artificial star sequence in the 169r-RCA1a amiRNA precursor.

[0030] SEQ ID NO:16 is the nucleotide sequence of the amiRNA precursor 396h-RCA1a.

[0031] SEQ ID NO:17 is the nucleotide sequence of the amiRNA precursor 169r-RCA1a.

[0032] SEQ ID NO:18 is the nucleotide sequence of the PHP39309 plasmid (FIG. 1).

[0033] SEQ ID NO:19 is the nucleotide sequence of the PHP39307 plasmid (FIG. 2).

[0034] SEQ ID NO:20 is the nucleotide sequence of the PHP39308 plasmid (FIG. 3).

[0035] SEQ ID NO:21 is the nucleotide sequence of the PHP40973 plasmid (FIG. 4).

[0036] SEQ ID NO:22 is the nucleotide sequence of the Rubisco Activase 1 gene in maize (ZmRCA1; Genbank ID No. AF084478.3).

[0037] SEQ ID NO:23 is the nucleotide sequence of a shuffled version of ZmRCA1 herein referred to as ZmRCA1MOD1.

[0038] SEQ ID NO:24 is the nucleotide sequence of a shuffled version of ZmRCA1 herein referred to as ZmRCA1MOD2 (Variant 1).

[0039] SEQ ID NO:25 is the nucleotide sequence of a shuffled version of ZmRCA1 herein referred to as ZmRCA1MOD3.

[0040] SEQ ID NO:26 is the nucleotide sequence of the C4 form of phosphoenolpyruvate carboxylase (PEPC) in maize.

[0041] SEQ ID NO:27 is the nucleotide sequence of a shuffled version of PEPC herein referred to as ZmPEPCMOD2.

[0042] SEQ ID NO:28 is the nucleotide sequence of a shuffled version of PEPC herein referred to as ZmPEPCMOD3.

[0043] SEQ ID NO:29 is the nucleotide sequence of the C3 form of phosphoenolpyruvate carboxylase (PEPC) in maize (NCBI GI No. 429148).

[0044] SEQ ID NO:30 is the nucleotide sequence of the root form of phosphoenolpyruvate carboxylase (PEPC) in maize (NCBI GI No. 3132309).

[0045] SEQ ID NO:31 is the nucleotide sequence of a shuffled version of PEPC herein referred to as ZmPEPCMOD1.

[0046] SEQ ID NO:32 is the amino acid sequence of the protein encoded by SEQ ID NO:23 (ZmRCA1MOD1).

[0047] SEQ ID NO:33 is the amino acid sequence of the protein encoded by SEQ ID NO:24 (ZmRCA1MOD2 (Variant 1)).

[0048] SEQ ID NO:34 is the amino acid sequence of the protein encoded by SEQ ID NO:25 (ZmRCA1MOD3).

[0049] SEQ ID NO:35 is the amino acid sequence of the maize Rubisco Activase 1 protein (NCBI GI No. 162458161).

[0050] SEQ ID NO:36 is the amino acid sequence of the protein encoded by SEQ ID NO:31 (ZmPEPCMOD 1).

[0051] SEQ ID NO:37 is the amino acid sequence of the protein encoded by SEQ ID NO:27 (ZmPEPCMOD2).

[0052] SEQ ID NO:38 is the amino acid sequence of the protein encoded by SEQ ID NO:28 (ZmPEPCMOD3).

[0053] SEQ ID NO:39 is the amino acid sequence of the maize phosphoenolpyruvate carboxylase (PEPC) (NCBI GI No. 27764449).

### DETAILED DESCRIPTION OF THE INVENTION

[0054] The present inventions now will be described more fully hereinafter with reference to the accompanying drawings, in which some, but not all embodiments of the inventions are shown. Indeed, these inventions may be embodied in many different forms and should not be construed as limited to the embodiments set forth herein; rather, these embodiments are provided so that this disclosure will satisfy applicable legal requirements. Like numbers refer to like elements throughout.

[0055] Many modifications and other embodiments of the inventions set forth herein will come to mind to one skilled in the art to which these inventions pertain having the benefit of the teachings presented in the foregoing descriptions and the associated drawings. Therefore, it is to be understood that the inventions are not to be limited to the specific embodiments disclosed and that modifications and other embodiments are intended to be included within the scope of the appended claims. Although specific terms are employed herein, they are used in a generic and descriptive sense only and not for purposes of limitation.

### I. Overview

[0056] Methods and compositions are provided that employ a microRNA (miRNA) that, when expressed in a plant or in an appropriate cell, is capable of reducing the expression of a target sequence without reducing the expression of a closely related sequence. For example, the methods and compositions can allow for the expression of an improved version of a protein, while reducing the expression of a similar protein.

[0057] Such methods and compositions employ recombinant miRNA expression constructs. As used herein, a “recombinant miRNA expression construct” refers to a DNA construct which comprises a miRNA precursor backbone having a polynucleotide sequence encoding a miRNA and a star sequence. The recombinant miRNA expression constructs are designed such that the most abundant miRNA produced from the construct is a 21-nucleotide miRNA.

[0058] “microRNA” or “miRNA” refers to oligoribonucleic acid, generally of about 19 to about 24 nucleotides (nt) in length, which regulates expression of a polynucleotide comprising a target sequence. microRNAs are non-protein-coding RNAs and have been identified in both animals and plants (Lagos-Quintana et al., Science 294:853-858 (2001), Lagos-Quintana et al., Curr. Biol. 12:735-739 (2002); Lau et al., Science 294:858-862 (2001); Lee and Ambros, Science 294:862-864 (2001); Llave et al., Plant Cell 14:1605-1619 (2002); Mourelatos et al., Genes. Dev. 16:720-728 (2002); Park et al., Curr. Biol. 12:1484-1495 (2002); Reinhart et al., Genes. Dev. 16:1616-1626 (2002)). miRNAs are derived, in plants, via dicer-like 1 processing of larger precursor polynucleotides. As discussed in further detail elsewhere herein, a miRNA can be an “artificial miRNA” or “amiRNA” which comprises a miRNA sequence that is synthetically designed to silence a target sequence.

[0059] Plant miRNAs regulate endogenous gene expression by recruiting silencing factors to complementary binding sites in target transcripts. microRNAs are initially transcribed as long polyadenylated RNAs and are processed to form a shorter sequence that has the capacity to form a stable hairpin and, when further processed by the siRNA machinery, release a miRNA. In plants, both processing steps are carried out by Dicer-like nucleases. miRNAs function by base-pairing to complementary RNA target sequences and trigger RNA cleavage of the target sequence by an RNA-induced silencing complex (RISC). microRNA molecules are highly efficient at inhibiting the expression of endogenous genes, and the RNA interference they induce is inherited by subsequent generations of plants.

### II. Compositions

[0060] A. Recombinant miRNA Expression Constructs Encoding 21-Nucleotide miRNAs

[0061] Recombinant miRNA expression constructs encoding a 21-nucleotide (21-nt) miRNA are provided herein. As used herein, a recombinant miRNA expression construct comprises a polynucleotide capable of being transcribed into an RNA sequence which is ultimately processed in the cell to form a miRNA. In some embodiments, the miRNA encoded by the recombinant miRNA expression construct is an artificial miRNA. Various modifications can be made to the recombinant miRNA expression construct to encode a miRNA. Such modifications are discussed in detail elsewhere herein.

[0062] In one embodiment, the recombinant miRNA expression construct comprises a miRNA precursor backbone having a heterologous miRNA and corresponding star sequence. As used herein, a “miRNA precursor backbone” is a polynucleotide that provides the backbone structure necessary to form a hairpin RNA structure which allows for the processing and ultimate formation of the miRNA. Thus, the miRNA precursor backbones are used as templates for expressing artificial miRNAs and their corresponding star sequence. Within the context of a recombinant miRNA expression construct, the miRNA precursor backbone comprises a DNA sequence having the heterologous miRNA and star sequences. When expressed as an RNA, the structure of the miRNA precursor backbone is such as to allow for the formation of a hairpin RNA structure that can be processed into a miRNA. In some embodiments, the miRNA precursor backbone comprises a genomic miRNA precursor sequence, wherein the sequence comprises a native precursor in which a heterologous miRNA and star sequence are inserted.

[0063] The miRNA precursor backbones can be from any source. In some embodiments, the miRNA precursor backbone is derived from a plant source. In some embodiments, the miRNA precursor backbone is from a monocot. In other embodiments, the miRNA precursor backbone is from a dicot. In further embodiments, the backbone is from maize or soybean. microRNA precursor backbones have been described previously. For example, US20090155910A1 discloses the following soybean miRNA precursor backbones: 156c, 159, 166b, 168c, 396b and 398b, and US20090155909A1 discloses the following maize miRNA precursor backbones: 159c, 164h, 168a, 169r, and 396h. Each of these references is incorporated by reference in their entirety. Non-limiting examples of miRNA precursor backbones disclosed herein include, for example, the miRNA ZM-169r precursor backbone or active variants thereof and the miRNA ZM-396h precursor backbone or active variants thereof. It is recognized that some modifications can be made to the miRNA precursor backbones provided herein, such that the nucleotide sequences maintain at least 60%, 70%, 75%, 80%, 85%, 90%, 95%, 96%, 97%, 98%, 99% or more sequence identity with the nucleotide sequence of the unmodified miRNA precursor backbone. Such variants of a miRNA precursor backbone retain miRNA precursor backbone activity and thereby continue to allow for the processing and ultimate formation of the miRNA.

[0064] When designing a recombinant miRNA expression construct to target a sequence of interest, the miRNA sequence of the backbone can be replaced with a heterologous miRNA designed to target any sequence of interest. In such instances, the corresponding star sequence in the recombinant miRNA expression construct will be altered such that the structure of the stem when folded remains the same as the endogenous structure. In such instances, both the star sequence and the miRNA sequence are heterologous to the miRNA precursor backbone.

[0065] Thus, in one embodiment, the miRNA precursor backbone can be altered to allow for efficient insertion of new miRNA and star sequences within the miRNA precursor backbone. In such instances, the miRNA segment and the star segment of the miRNA precursor backbone are replaced with the heterologous miRNA and the heterologous star sequence using a PCR technique and cloned into an expression plasmid to create the recombinant miRNA expression construct. It is recognized that there could be alterations to the position at which the heterologous miRNA and star sequences are inserted into the backbone. Detailed methods for inserting the miRNA and star sequence into the miRNA precursor backbone are described, for example, in US Patent Applications 20090155909A1 and US20090155910A1, herein incorporated by reference in their entirety.

[0066] In one embodiment, the miRNA precursor backbone comprises a first polynucleotide segment encoding a miRNA and a second polynucleotide segment encoding a star sequence, wherein the first and second polynucleotide segments are heterologous to the miRNA precursor backbone. As used herein, “heterologous” with respect to a sequence is intended to mean a sequence that originates from a foreign species, or, if from the same species, is substantially modified from its native form in composition and/or genomic locus by deliberate human intervention. For example, with respect to a nucleic acid, it can be a nucleic acid that originates from a foreign species, or is synthetically designed, or, if from the same species, is substantially modified from its native form in composition and/or genomic locus by deliberate human intervention. Thus, in the context of a recombinant miRNA expression construct, a heterologous miRNA and star sequence are not native to the miRNA precursor backbone. A recombinant miRNA expression construct comprising such a heterologous miRNA and star sequence can also be referred to as an “artificial” miRNA expression construct. Similarly, an “artificial” miRNA precursor backbone comprises a heterologous miRNA and star sequence with respect to the backbone.

[0067] The order of the miRNA and the star sequence within the recombinant miRNA expression construct can be altered. For example, in specific embodiments, the first polynucleotide segment comprising the miRNA segment of the recombinant miRNA expression construct is positioned 5′ to the second polynucleotide sequence comprising the star sequence. Alternatively, the second polynucleotide sequence comprising the star sequence can be positioned 5′ to the first polynucleotide sequence comprising the miRNA sequence in the recombinant miRNA expression construct.

[0068] As discussed above, the recombinant miRNA expression constructs are designed such that the most abundant form of miRNA produced from the recombinant miRNA expression construct is 21-nt in length. Such an expression construct will therefore comprise a first polynucleotide segment comprising the miRNA sequence and a second polynucleotide segment comprising the corresponding star sequence, wherein the star sequence and miRNA are 21-nt in length. In such instances, the star sequence and the miRNA sequence hybridize to each other. Such a structure results in a 21-nt miRNA being the most abundant form of miRNA produced.

[0069] As used herein, by “most abundant form” is meant the 21-nt miRNA representing the largest population of miRNAs produced from the recombinant miRNA expression construct. In other words, while the recombinant miRNA expression construct may produce miRNAs that are not 21-nt in length (i.e. 19-nt, 20-nt, 22-nt, etc.) the most abundant miRNA produced from the recombinant miRNA expression construct is 21-nt in length. Thus, the 21-nt miRNA represents at least 50%, 60%, 70%, 80%, 90%, 95% or 100% of the total miRNA population produced from the recombinant miRNA expression construct.

[0070] As used herein, a “star sequence” is the sequence within a miRNA precursor backbone that is complementary to the miRNA and forms a duplex with the miRNA to form the stem structure of a hairpin RNA. In some embodiments, the star sequence can comprise less than 100% complementarity to the miRNA sequence. Alternatively, the star sequence can comprise at least 99%, 98%, 97%, 96%, 95%, 90%, 85%, 80% or lower sequence complementarity to the miRNA sequence as long as the star sequence has sufficient complementarity to the miRNA sequence to form a double stranded structure. In still further embodiments, the star sequence comprises a sequence having 1, 2, 3, 4, 5 or more mismatches with the miRNA sequence and still has sufficient complementarity to form a double stranded structure with the miRNA sequence resulting in production of miRNA and suppression of the target sequence.

[0071] The most abundant miRNA produced from the recombinant miRNA expression construct is 21-nt in length and has sufficient sequence complementarity to a target sequence whose level of RNA is to be reduced. By “sufficient sequence complementarity” to the target sequence is meant that the complementarity is sufficient to allow the 21-nt miRNA to form a double stranded structure with the target sequence and reduce the level of expression of the target sequence. In specific embodiments, a miRNA having sufficient complementarity to the target sequence can share 100% sequence complementarity to the target sequence or it can share less than 100% sequence complementarity (i.e., at least 99%, 98%, 97%, 96%, 95%, 90%, 85%, 80%, 75%, 70% or less sequence complementarity) to the target sequence. In other embodiments, the miRNA can have 1, 2, 3, 4, 5 or up to 6 alterations or mismatches with the target sequence, so long as the 21-nt miRNA has sufficient complementarity to the target sequence to reduce the level of expression of the target sequence. Endogenous miRNAs with multiple mismatches with the target sequence have been reported. For example, see Schawb et al. (2005) Developmental Cell 8:517-27 and Cuperus et al. (2010) Nature Structural and Molecular Biology 17:997-1003, herein incorporated by reference in their entirety.

[0072] When designing a miRNA sequence and star sequence for the recombinant miRNA expression constructs disclosed herein, various design choices can be made. See, for example, Schwab R, et al. (2005) Dev Cell 8: 517-27. In non-limiting embodiments, the miRNA sequences disclosed herein can have a “U” at the 5′-end, a “C” or “G” at the 19^{th} nucleotide position, and an “A” or “U” at the 10th nucleotide position. In other embodiments, the miRNA design is such that the miRNA have a high free delta-G as calculated using the ZipFold algorithm (Markham, N. R. & Zuker, M. (2005) Nucleic Acids Res. 33: W577-W581.) Optionally, a one base pair change can be added within the 5′ portion of the miRNA so that the sequence differs from the target sequence by one nucleotide.

[0073] B. Target Sequences

[0074] As used herein, “target sequence” refers to the sequence that the miRNA is designed to reduce and thus the expression of its RNA is to be modulated, e.g., reduced. The region of a target sequence of a gene of interest which is used to design the miRNA may be a portion of an open reading frame, 5′ or 3′ untranslated region, exon(s), intron(s), flanking region, etc. General categories of genes of interest include, for example, those genes involved in information, such as transcription factors, those involved in communication, such as kinases, and those involved in housekeeping, such as heat shock proteins. More specific categories, for example, include genes encoding important traits for agronomics, insect resistance, disease resistance, herbicide resistance, sterility, grain characteristics, and commercial products. Genes of interest include, generally, those involved in oil, starch, carbohydrate, or nutrient metabolism as well as those affecting kernel size, sucrose loading, and the like. The target sequence may be an endogenous sequence, or may be an introduced heterologous sequence. In a specific embodiment, the target sequence is a sequence endogenous to the plant cell. As used herein, an “endogenous” sequence is a native or naturally occurring sequence. When present within an organism, the endogenous sequence is native in that organism and present in its native genomic position.

[0075] Non-limiting examples of target sequences include, for example, members of the phosphoenolpyruvate carboxylase (PEPC) protein family or RUBISCO Activase 1.

[0076] PEPC is a member of the family of carboxy-lyases. PEPC influences the addition of bicarbonate to phosphoenolpyruvate to form oxaloacetate and is involved in carbon fixation and photosynthesis. In a non-limiting embodiment, the target sequence encodes a member of the phosphoenolpyruvate carboxylase protein family. Non-limiting examples of PEPC polynucleotide sequences from maize are set forth in SEQ ID NOs:26, 29, and 30. The DNA sequences corresponding to non-limiting examples of amiRNAs designed to reduce the level of mRNA of the PEPC having SEQ ID NO:26 are set forth in SEQ ID NOs:1 and 2.

[0077] RUBISCO, Ribulose-1,5-bisphophate carboxylase oxygenase, catalyzes the carboxylation or oxygenization of ribulose-1,5-bisphosphate with carbon dioxide or oxygen, which is a major rate-limiting step in photosynthesis. RUBISCO Activase is a member of the AAA⁺ super family and is involved in the activation of RUBISCO. RUBISCO Activase participates in the activation of RUBISCO by enhancing the removal of inhibitors from the active site of RUBISCO in an ATP-dependent manner. There are 2 isoforms of RUBISCO Activase, a 43 kDa and a 46 kDa isoform, formed by alternative splicing and differing only in the C-terminal region. In a non-limiting embodiment, the target sequence encodes RUBISCO Activase 1. A non-limiting example of a RUBISCO Activase 1 polynucleotide sequence from maize is set forth in SEQ ID NO:22. The DNA sequence corresponding to a non-limiting examples of an amiRNA designed to reduce the level of mRNA of RUBISCO Activase 1 is set forth in SEQ ID NO: 13.

[0078] The 21-nt miRNA produced from the recombinant miRNA expression construct is capable of reducing the level of mRNA of the target sequence without reducing the level of mRNA of a closely related recombinant polynucleotide of interest. Methods to assay for reduction in expression of mRNA include, for example, monitoring for a reduction in mRNA levels for the target sequence or monitoring for a change in phenotype. Various ways to assay for a reduction in the expression of a target sequence are discussed elsewhere herein. Thus, as disclosed herein, a single miRNA can silence a target sequence of interest, but not a closely related recombinant polynucleotide of interest.

[0079] As used herein, “reducing,” “suppression,” “silencing,” and “inhibition” are used interchangeably to denote the down-regulation of the level of expression of a product of a target sequence relative to its normal expression level in a wild type organism. By “reducing the level of RNA” is intended a reduction in expression by any statistically significant amount including, for example, a reduction of at least 10%, 15%, 20%, 25%, 30%, 35%, 40%, 45%, 50%, 55%, 60%, 65%, 70%, 75%, 80%, 85%, 90%, 95%, or 100% relative to the wild type expression level. As used herein, “without reducing the level of mRNA” or “not reduced” is intended any level of mRNA that is not reduced by any statistically significant amount relative to the mRNA level in the absence of expression of the recombinant miRNA expression construct, including, for example, a reduction in mRNA of about 9%, 8%, 7%, 6%, 5%, 4%, 3%, 2%, 1%, 0.5%, 0.1% or less. The term “expression” as used herein refers to the biosynthesis of a gene product, including the transcription and/or translation of said gene product. Thus, expression of a nucleic acid molecule may refer to transcription of the nucleic acid fragment (e.g., transcription resulting in mRNA or other functional RNA) and/or translation of RNA into a precursor or mature protein (polypeptide).

[0080] C. Relationship Between the Target Sequence and the Closely Related Sequence

[0081] The miRNAs produced from the recombinant miRNA expression constructs disclosed herein can suppress a target sequence, but do not reduce the level of mRNA of a polynucleotide of interest having a sequence closely related to the target sequence. As used herein a “closely related” sequence is related to the target sequence such that the given nucleic acids of the closely related sequence and the target sequence share at least 50%, 55%, 60%, 65%, 70%, 75%, 80%, 85%, 90%, 91%, 92%, 93%, 94%, 95%, 96%, 97%, 98% or 99% sequence identity. The miRNAs produced from the recombinant miRNA expression constructs disclosed herein can suppress a target sequence such that the level of mRNA of at least 1, 2, 3, 4, 5 or more different sequences that are closely related to the target sequence are not reduced. In one embodiment, the target sequence is an endogenous sequence. In another embodiment, the closely related sequence is a recombinant polynucleotide of interest.

[0082] In a specific embodiment, the polynucleotide of interest is a shuffled variant of the target sequence. The term, “shuffling” or ‘shuffled” is used herein to indicate recombination between similar but non-identical polynucleotide sequences. As used herein, a “shuffled variant” is a new gene created by shuffling. Generally, more than one cycle of recombination is performed in shuffling methods. With such a procedure, one or more different genes of interest can be manipulated to create a new polynucleotide of interest possessing the desired properties. In this manner, libraries of recombinant polynucleotides are generated from a population of related sequence polynucleotides comprising sequence regions that have substantial sequence identity and can be homologously recombined in vitro and in vivo. For example, using this approach, sequence motifs encoding a domain of interest may be shuffled between the gene of interest and other known genes to obtain a new gene coding for a protein with an improved property of interest, such as Km in the case of an enzyme. Strategies for such DNA shuffling are known in the art. See, for example, Stemmer (1994) Proc. Natl. Acad. Sci. USA 91:10747-10751; Stemmer (1994) Nature 370:389-391; Crameri et al. (1997) Nature Biotech. 15:436-438; Moore et al. (1997) J. Mol. Biol. 272:336-347; Zhang et al. (1997) Proc. Natl. Acad. Sci. USA 94:4504-4509; Crameri et al. (1998) Nature 391:288-291; and U.S. Pat. Nos. 5,605,793 and 5,837,458.

[0083] In one embodiment, the miRNA encoded by the recombinant miRNA expression construct corresponds to a complement of a region of the mRNA of the target sequence. The region of the mRNA of the target sequence can have 100% complementarity to the 21-nt miRNA, or the region of the mRNA of the target sequence can have at least 1, 2 or 3 non-complementary nucleotides to the 21-nt miRNA such that the miRNA reduces the level of mRNA of the target sequence but not the level of mRNA of a closely related polynucleotide of interest. As used herein, “complementary nucleotides”, “complementary sequence” or “complement” in reference to a sequence or region of nucleotides, are nucleotides that can form a double stranded structure. As such, “non-complementary” nucleotides are nucleotides that cannot form a double stranded structure. In further embodiments, the miRNA comprises at least 5, 6, 7, 8, 9, 10 or more non-complementary nucleotides to any given region across the length of the mRNA encoded by the polynucleotide of interest such that the miRNA reduces the level of mRNA of the target sequence but does not reduce the level of mRNA of the polynucleotide of interest.

[0084] In one embodiment, a first element comprising a recombinant expression construct comprising a polynucleotide of interest and a second element comprising a recombinant miRNA expression construct are present on the same polynucleotide construct. In such cases, the first element and the second element are integrated into the genome of a plant cell on the same construct. Further, the first and second elements can be operably linked to the same promoter. Alternatively, the first element and the second element can be present on separate polynucleotide constructs and are integrated into the genome of a plant cell on different polynucleotide constructs. In such cases, the first element comprises a first promoter operably linked to a sequence encoding a polynucleotide of interest and the second element comprises a second promoter operably linked to the recombinant miRNA expression construct.

[0085] D. Polynucleotides of Interest

[0086] The compositions further include various polynucleotides of interest. The polynucleotide of interest can be, but is not limited to, a native polynucleotide, a transgene, a shuffled variant of the target sequence, or any polynucleotide having a sequence closely related to the target sequence. In one embodiment, the miRNA, when expressed in a plant, reduces the level of mRNA of the target sequence without reducing the level of mRNA encoded by the polynucleotide of interest.

[0087] Various changes in phenotype are of interest, including modifying the fatty acid composition in a plant, altering the amino acid content of a plant, altering a plant's pathogen defense mechanism, altering a plant's tolerance to herbicides, and the like. These results can be achieved by providing expression of heterologous products (i.e. polynucleotides of interest). Alternatively, the results can be achieved by providing for a reduction of expression of one or more endogenous products, while at the same time providing expression of polynucleotides of interest in the plant. These changes result in a change in phenotype of the transformed plant.

[0088] Polynucleotides/polypeptides of interest include, but are not limited to, abiotic and biotic stress tolerance coding sequences, or sequences modifying plant traits such as yield, grain quality, nutrient content, starch quality and quantity, nitrogen fixation and/or utilization, and oil content and/or composition. More specific polynucleotides of interest include, but are not limited to, genes that improve crop yield, polypeptides that improve desirability of crops, genes encoding proteins conferring resistance to abiotic stress, such as drought, nitrogen, temperature, salinity, toxic metals or trace elements,

[0089] Agronomically important traits such as oil, starch, and protein content can be genetically altered in addition to using traditional breeding methods. Modifications include increasing content of oleic acid, saturated and unsaturated oils, increasing levels of lysine and sulfur, providing essential amino acids, and also modification of starch. Hordothionin protein modifications are described in U.S. Pat. Nos. 5,703,049, 5,885,801, 5,885,802, and 5,990,389, herein incorporated by reference. Another example is lysine and/or sulfur rich seed protein encoded by the soybean 2S albumin described in U.S. Pat. No. 5,850,016, and the chymotrypsin inhibitor from barley, described in Williamson et al. (1987) Eur. J. Biochem. 165:99-106, the disclosures of which are herein incorporated by reference.

[0090] Commercial traits can also be encoded on a polynucleotide of interest that could increase for example, starch for ethanol production, or provide expression of proteins. Another important commercial use of transformed plants is the production of polymers and bioplastics such as described in U.S. Pat. No. 5,602,321. Genes such as β-Ketothiolase, PHBase (polyhydroxyburyrate synthase), and acetoacetyl-CoA reductase (see Schubert et al. (1988) J. Bacteria 170:5837-5847) facilitate expression of polyhyroxyalkanoates (PHAs).

[0091] Polynucleotides that improve crop yield include dwarfing genes, such as Rht1 and Rht2 (Peng et al. (1999) Nature 400:256-261), and those that increase plant growth, such as ammonium-inducible glutamate dehydrogenase. Polynucleotides that improve desirability of crops include, for example, those that allow plants to have reduced saturated fat content, those that boost the nutritional value of plants, and those that increase grain protein. Polynucleotides that improve salt tolerance are those that increase or allow plant growth in an environment of higher salinity than the native environment of the plant into which the salt-tolerant gene(s) has been introduced.

[0092] Polynucleotides/polypeptides that influence amino acid biosynthesis include, for example, anthranilate synthase (AS; EC 4.1.3.27) which catalyzes the first reaction branching from the aromatic amino acid pathway to the biosynthesis of tryptophan in plants, fungi, and bacteria. In plants, the chemical processes for the biosynthesis of tryptophan are compartmentalized in the chloroplast. See, for example, US Pub. 20080050506, herein incorporated by reference. Additional sequences of interest include Chorismate Pyruvate Lyase (CPL) which refers to a gene encoding an enzyme which catalyzes the conversion of chorismate to pyruvate and pHBA. The most well characterized CPL gene has been isolated from E. coli and bears the GenBank accession number M96268. See, U.S. Pat. No. 7,361,811, herein incorporated by reference.

[0093] In some embodiments, the polynucleotide of interest has a nucleotide sequence closely related to the nucleotide sequence of a member of the phosphoenolpyruvate carboxylase (PEPC) protein family. Non-limiting examples of polynucleotides of interest with closely related sequences to the PEPC gene set forth in SEQ ID NO:26 are represented by SEQ ID NOs:27, 28, and 31 or active variants and fragments thereof. In other embodiments, the polynucleotide of interest has a nucleotide sequence closely related to RUBISCO Activase 1. Non-limiting examples of polynucleotides of interest with closely related sequences to the RUBISCO Activase 1 gene set forth in SEQ ID NO:22 are represented by SEQ ID NOs:23, 24, and 25 or active variants and fragments thereof.

[0094] Active variants or fragments of polynucleotides/polypeptides of interest are also provided. Such active variants can comprise at least 65%, 70%, 75%, 80%, 85%, 90%, 91%, 92%, 93%, 94%, 95%, 96%, 97%, 98%, 99% or more sequence identity to the native polynucleotide/polypeptide of interest, wherein the active variants retain the biological activity of the native polynucleotide/polypeptide. Active variants or fragments of PEPC (i.e. SEQ ID NOs:27, 28, and 31 or active variants or fragments thereof) are provided herein such that they retain PEPC activity and thereby influence the formation of oxaloacetate. Any method known in the art can be used to assay for the activity of PEPC, including, but not limited to, measuring the formation of oxaloacetate in a sample in the presence of phosphoenolpyruvate, PEPC and carbon dioxide. Active variants and fragments of RUBISCO Activase 1 (i.e. SEQ ID NOs:23, 24, and 25 or active variants or fragments thereof) are also provided herein such that they retain RUBISCO Activase 1 activity and thereby induce RUBISCO activation. Any method known in the art can be used to assay for the activity of RUBISCO Activase, including, but not limited to, RUBISCO activation and ATP hydrolysis.

[0095] E. Polynucleotides

[0096] Compositions further include isolated or recombinant polynucleotides or polynucleotide constructs that encode the recombinant miRNA expression constructs, the various recombinant expression constructs that encode polynucleotides of interest, the various components of the recombinant miRNA expression constructs, along with the various products of the recombinant miRNA expression constructs that are processed into the miRNA. Exemplary components of the recombinant miRNA expression constructs include, for example, polynucleotides comprising miRNA precursor backbones, miRNA and star sequences, primers for generating the miRNAs and nucleotide sequences that encode the various RNA sequences. As used herein, “encodes” or “encoding” refers to a DNA sequence which can be processed to generate an RNA and/or polypeptide.

[0097] In one embodiment, a polynucleotide construct comprising a first element having a recombinant expression construct comprising a polynucleotide of interest and a second element comprising a recombinant miRNA expression construct is provided. In a specific embodiment, the first and second elements are operably linked to the same promoter.

[0098] The terms “polynucleotide,” “polynucleotide sequence,” “nucleic acid sequence,” and “nucleic acid fragment” are used interchangeably herein. These terms encompass nucleotide sequences and the like. A polynucleotide may be a polymer of RNA or DNA that is single- or double-stranded, that optionally contains synthetic, non-natural or altered nucleotide bases. A polynucleotide in the form of a polymer of DNA may be comprised of one or more segments of cDNA, genomic DNA, synthetic DNA, or mixtures thereof. The use of the term “polynucleotide” is not intended to limit the present invention to polynucleotides comprising DNA. Those of ordinary skill in the art will recognize that polynucleotides, can comprise ribonucleotides and combinations of ribonucleotides and deoxyribonucleotides. Such deoxyribonucleotides and ribonucleotides include both naturally occurring molecules and synthetic analogues. The polynucleotides provided herein also encompass all forms of sequences including, but not limited to, single-stranded forms, double-stranded forms, hairpins, stem-and-loop structures, and the like.

[0099] The compositions provided herein can comprise an isolated or substantially purified polynucleotide. An “isolated” or “purified” polynucleotide is substantially or essentially free from components that normally accompany or interact with the polynucleotide as found in its naturally occurring environment. Thus, an isolated or purified polynucleotide is substantially free of other cellular material, or culture medium when produced by recombinant techniques, or substantially free of chemical precursors or other chemicals when chemically synthesized. Optimally, an “isolated” polynucleotide is free of sequences (optimally protein encoding sequences) that naturally flank the polynucleotide (i.e., sequences located at the 5′ and 3′ ends of the polynucleotide) in the genomic DNA of the organism from which the polynucleotide is derived. For example, in various embodiments, the isolated polynucleotide can contain less than about 5 kb, 4 kb, 3 kb, 2 kb, 1 kb, 0.5 kb, or 0.1 kb of nucleotide sequence that naturally flank the polynucleotide in genomic DNA of the cell from which the polynucleotide is derived.

[0100] Further provided are recombinant polynucleotides comprising the polynucleotides of interest, the recombinant miRNA expression constructs and various components thereof. The terms “recombinant polynucleotide” and “recombinant DNA construct” are used interchangeably herein. A recombinant construct comprises an artificial or heterologous combination of nucleic acid sequences, e.g., regulatory and coding sequences that are not found together in nature. For example, a recombinant miRNA expression construct can comprise a miRNA precursor backbone having heterologous polynucleotides comprising the miRNA sequence and the star sequence and, thus the miRNA sequence and star sequence are not native to the miRNA precursor backbone. In other embodiments, a recombinant construct may comprise regulatory sequences and coding sequences that are derived from different sources, or regulatory sequences and coding sequences derived from the same source, but arranged in a manner different than that found in nature. Such a construct may be used by itself or may be used in conjunction with a vector. If a vector is used, then the choice of vector is dependent upon the method that will be used to transform host cells as is well known to those skilled in the art. For example, a plasmid vector can be used. The skilled artisan is well aware of the genetic elements that must be present on the vector in order to successfully transform, select and propagate host cells comprising any of the isolated nucleic acid fragments of the invention. The skilled artisan will also recognize that different independent transformation events will result in different levels and patterns of expression (Jones et al., EMBO J. 4:2411-2418 (1985); De Almeida et al., Mol. Gen. Genetics 218:78-86 (1989)), and thus that multiple events must be screened in order to obtain lines displaying the desired expression level and pattern. Such screening may be accomplished by Southern analysis of DNA, Northern analysis of mRNA expression, immunoblotting analysis of protein expression, or phenotypic analysis, among others.

[0101] In specific embodiments, one or more of the expression constructs described herein can be provided in an expression cassette for expression in a plant or other organism or cell type of interest. The cassette can include 5′ and 3′ regulatory sequences operably linked to a polynucleotide provided herein. “Operably linked” is intended to mean a functional linkage between two or more elements. For example, an operable linkage between a polynucleotide of interest and a regulatory sequence (i.e., a promoter) is a functional link that allows for expression of the polynucleotide of interest. Operably linked elements may be contiguous or non-contiguous. When used to refer to the joining of two protein coding regions, by operably linked is intended that the coding regions are in the same reading frame. The cassette may additionally contain at least one additional gene to be cotransformed into the organism. Alternatively, the additional gene(s) can be provided on multiple expression cassettes. Such an expression cassette is provided with a plurality of restriction sites and/or recombination sites for insertion of a recombinant polynucleotide to be under the transcriptional regulation of the regulatory regions. The expression cassette may additionally contain selectable marker genes.

[0102] The expression cassette can include in the 5′-3′ direction of transcription, a transcriptional and translational initiation region (i.e., a promoter), a recombinant polynucleotide provided herein, and a transcriptional and translational termination region (i.e., termination region) functional in plants. The regulatory regions (i.e., promoters, transcriptional regulatory regions, and translational termination regions) and/or a recombinant polynucleotide provided herein may be native/analogous to the host cell or to each other. Alternatively, the regulatory regions and/or a recombinant polynucleotide provided herein may be heterologous to the host cell or to each other. For example, a promoter operably linked to a heterologous polynucleotide is from a species different from the species from which the polynucleotide was derived, or, if from the same/analogous species, one or both are substantially modified from their original form and/or genomic locus, or the promoter is not the native promoter for the operably linked polynucleotide. Alternatively, the regulatory regions and/or a recombinant polynucleotide provided herein may be entirely synthetic.

[0103] The termination region may be native with the transcriptional initiation region, may be native with the operably linked recombinant polynucleotide of interest, may be native with the plant host, or may be derived from another source (i.e., foreign or heterologous) to the promoter, the recombinant polynucleotide of interest, the plant host, or any combination thereof. Convenient termination regions are available from the Ti-plasmid of A. tumefaciens, such as the octopine synthase and nopaline synthase termination regions. See also Guerineau et al. (1991) Mol. Gen. Genet. 262:141-144; Proudfoot (1991) Cell 64:671-674; Sanfacon et al., (1991) Genes Dev. 5:141-149; Mogen et al., (1990) Plant Cell 2:1261-1272; Munroe et al. (1990) Gene 91:151-158; Ballas et al. (1989) Nucleic Acids Res. 17:7891-7903; and Joshi et al. (1987) Nucleic Acids Res. 15:9627-9639.

[0104] In preparing the expression cassettes, the various DNA fragments may be manipulated, so as to provide for the DNA sequences in the proper orientation. Toward this end, adapters or linkers may be employed to join the DNA fragments or other manipulations may be involved to provide for convenient restriction sites, removal of superfluous DNA, removal of restriction sites, or the like. For this purpose, in vitro mutagenesis, primer repair, restriction, annealing, resubstitutions, e.g., transitions and transversions, may be involved.

[0105] A number of promoters can be used in the various expression constructs provided herein. The promoters can be selected based on the desired outcome. It is recognized that different applications can be enhanced by the use of different promoters in the recombinant expression constructs and/or the recombinant miRNA expression constructs to modulate the timing, location and/or level of expression of the polynucleotide of interest and/or the miRNA. Such recombinant expression constructs may also contain, if desired, a promoter regulatory region (e.g., one conferring inducible, constitutive, environmentally- or developmentally-regulated, or cell- or tissue-specific/selective expression), a transcription initiation start site, a ribosome binding site, an RNA processing signal, a transcription termination site, and/or a polyadenylation signal.

[0106] In some embodiments, the expression constructs provided herein can be combined with constitutive, tissue-preferred, or other promoters for expression in plants. Examples of constitutive promoters include the cauliflower mosaic virus (CaMV) ³⁵S transcription initiation region, the 1′- or 2′-promoter derived from T-DNA of Agrobacterium tumefaciens, the ubiquitin 1 promoter, the Smas promoter, the cinnamyl alcohol dehydrogenase promoter (U.S. Pat. No. 5,683,439), the Nos promoter, the pEmu promoter, the rubisco promoter, the GRP1-8 promoter and other transcription initiation regions from various plant genes known to those of skill. If low level expression is desired, weak promoter(s) may be used. Weak constitutive promoters include, for example, the core promoter of the Rsyn7 promoter (WO 99/43838 and U.S. Pat. No. 6,072,050), the core 35S CaMV promoter, and the like. Other constitutive promoters include, for example, U.S. Pat. Nos. 5,608,149; 5,608,144; 5,604,121; 5,569,597; 5,466,785; 5,399,680; 5,268,463; and 5,608,142. See also, U.S. Pat. No. 6,177,611, herein incorporated by reference.

[0107] Examples of inducible promoters are the Adh1 promoter which is inducible by hypoxia or cold stress, the Hsp70 promoter which is inducible by heat stress, the PPDK promoter and the pepcarboxylase promoter which are both inducible by light. Also useful are promoters which are chemically inducible, such as the In2-2 promoter which is safener induced (U.S. Pat. No. 5,364,780), the ERE promoter which is estrogen induced, and the Axig1 promoter which is auxin induced and tapetum specific but also active in callus (PCT US01/22169).

[0108] Examples of promoters under developmental control include promoters that initiate transcription preferentially in certain tissues, such as leaves, roots, fruit, seeds, or flowers. An exemplary promoter is the anther specific promoter 5126 (U.S. Pat. Nos. 5,689,049 and 5,689,051). Examples of seed-preferred promoters include, but are not limited to, 27 kD gamma zein promoter and waxy promoter, Boronat, A. et al. (1986) Plant Sci. 47:95-102; Reina, M. et al. Nucl. Acids Res. 18(21):6426; and Kloesgen, R. B. et al. (1986) Mol. Gen. Genet. 203:237-244. Promoters that express in the embryo, pericarp, and endosperm are disclosed in U.S. Pat. No. 6,225,529 and PCT publication WO 00/12733. The disclosures for each of these are incorporated herein by reference in their entirety.

[0109] Chemical-regulated promoters can be used to modulate the expression of a gene in a plant through the application of an exogenous chemical regulator. Depending upon the objective, the promoter may be a chemical-inducible promoter, where application of the chemical induces gene expression, or a chemical-repressible promoter, where application of the chemical represses gene expression. Chemical-inducible promoters are known in the art and include, but are not limited to, the maize In2-2 promoter, which is activated by benzenesulfonamide herbicide safeners, the maize GST promoter, which is activated by hydrophobic electrophilic compounds that are used as pre-emergent herbicides, and the tobacco PR-1a promoter, which is activated by salicylic acid. Other chemical-regulated promoters of interest include steroid-responsive promoters (see, for example, the glucocorticoid-inducible promoter in Schena et al. (1991) Proc. Natl. Acad. Sci. USA 88:10421-10425 and McNellis et al. (1998) Plant J. 14(2):247-257) and tetracycline-inducible and tetracycline-repressible promoters (see, for example, Gatz et al. (1991) Mol. Gen. Genet. 227:229-237, and U.S. Pat. Nos. 5,814,618 and 5,789,156), herein incorporated by reference.

[0110] Tissue-preferred promoters can be utilized to target enhanced expression of an expression construct within a particular plant tissue. Tissue-preferred promoters are known in the art. See, for example, Yamamoto et al. (1997) Plant J. 12(2):255-265; Kawamata et al. (1997) Plant Cell Physiol. 38(7):792-803; Hansen et al. (1997) Mol. Gen. Genet. 254(3):337-343; Russell et al. (1997) Transgenic Res. 6(2):157-168; Rinehart et al. (1996) Plant Physiol. 112(3):1331-1341; Van Camp et al. (1996) Plant Physiol. 112(2):525-535; Canevascini et al. (1996) Plant Physiol. 112(2):513-524; Yamamoto et al. (1994) Plant Cell Physiol. 35(5):773-778; Lam (1994) Results Probl. Cell Differ. 20:181-196; Orozco et al. (1993) Plant Mol. Biol. 23(6):1129-1138; Matsuoka et al. (1993) Proc Natl. Acad. Sci. USA 90(20):9586-9590; and Guevara-Garcia et al. (1993) Plant J. 4(3):495-505. Such promoters can be modified, if necessary, for weak expression.

[0111] Leaf-preferred promoters are known in the art. See, for example, Yamamoto et al. (1997) Plant J. 12(2):255-265; Kwon et al. (1994) Plant Physiol. 105:357-67; Yamamoto et al. (1994) Plant Cell Physiol. 35(5):773-778; Gotor et al. (1993) Plant J. 3:509-18; Orozco et al. (1993) Plant Mol. Biol. 23(6):1129-1138; and Matsuoka et al. (1993) Proc. Natl. Acad. Sci. USA 90(20):9586-9590. In addition, the promoters of cab and rubisco can also be used. See, for example, Simpson et al. (1958) EMBO J 4:2723-2729 and Timko et al. (1988) Nature 318:57-58.

[0112] Root-preferred promoters are known and can be selected from the many available from the literature or isolated de novo from various compatible species. See, for example, Hire et al. (1992) Plant Mol. Biol. 20(2):207-218 (soybean root-specific glutamine synthetase gene); Keller and Baumgartner (1991) Plant Cell 3(10):1051-1061 (root-specific control element in the GRP 1.8 gene of French bean); Sanger et al. (1990) Plant Mol. Biol. 14(3):433-443 (root-specific promoter of the mannopine synthase (MAS) gene of Agrobacterium tumefaciens); and Miao et al. (1991) Plant Cell 3(1):11-22 (full-length cDNA clone encoding cytosolic glutamine synthetase (GS), which is expressed in roots and root nodules of soybean). See also Bogusz et al. (1990) Plant Cell 2(7):633-641, where two root-specific promoters isolated from hemoglobin genes from the nitrogen-fixing nonlegume Parasponia andersonii and the related non-nitrogen-fixing nonlegume Trema tomentosa are described. The promoters of these genes were linked to a β-glucuronidase reporter gene and introduced into both the nonlegume Nicotiana tabacum and the legume Lotus corniculatus, and in both instances root-specific promoter activity was preserved. Leach and Aoyagi (1991) describe their analysis of the promoters of the highly expressed roIC and roID root-inducing genes of Agrobacterium rhizogenes (see Plant Science (Limerick) 79(1):69-76). They concluded that enhancer and tissue-preferred DNA determinants are dissociated in those promoters. Teeri et al. (1989) used gene fusion to lacZ to show that the Agrobacterium T-DNA gene encoding octopine synthase is especially active in the epidermis of the root tip and that the TR2′ gene is root specific in the intact plant and stimulated by wounding in leaf tissue, an especially desirable combination of characteristics for use with an insecticidal or larvicidal gene (see EMBO J. 8(2):343-350). The TR1′ gene, fused to nptII (neomycin phosphotransferase II) showed similar characteristics. Additional root-preferred promoters include the VfENOD-GRP3 gene promoter (Kuster et al. (1995) Plant Mol. Biol. 29(4):759-772); and roIB promoter (Capana et al. (1994) Plant Mol. Biol. 25(4):681-691. See also U.S. Pat. Nos. 5,837,876; 5,750,386; 5,633,363; 5,459,252; 5,401,836; 5,110,732; and 5,023,179. The phaseolin gene (Murai et al. (1983) Science 23:476-482 and Sengopta-Gopalen et al. (1988) PNAS 82:3320-3324.

[0113] The expression cassettes can also comprise a selectable marker gene for the selection of transformed cells. Selectable marker genes are utilized for the selection of transformed cells or tissues. Marker genes include genes encoding antibiotic resistance, such as those encoding neomycin phosphotransferase II (NEO) and hygromycin phosphotransferase (HPT), as well as genes conferring resistance to herbicidal compounds, such as glufosinate ammonium, bromoxynil, imidazolinones, and 2,4-dichlorophenoxyacetate (2,4-D) and sulfonylureas. Additional selectable markers include phenotypic markers such as beta-galactosidase and fluorescent proteins such as green fluorescent protein (GFP) (Su et al. (2004) Biotechnol. Bioeng. 85:610-9 and Fetter et al. (2004) Plant Cell 16:215-28), cyan fluorescent protein (CYP) (Bolte et al. (2004) J. Cell Science 117:943-54 and Kato et al. (2002) Plant Physiol. 129:913-42), and yellow fluorescent protein (PhiYFP™ from Evrogen; see, Bolte et al. (2004) J. Cell Science 117:943-54). For additional selectable markers, see generally, Yarranton (1992) Curr. Opin. Biotech. 3:506-511; Christopherson et al. (1992) Proc. Natl. Acad. Sci. USA 89:6314-6318; Yao et al. (1992) Cell 71:63-72; Reznikoff (1992) Mol. Microbiol. 6:2419-2422; Barkley et al. (1980) in The Operon, pp. 177-220; Hu et al. (1987) Cell 48:555-566; Brown et al. (1987) Cell 49:603-612; Figge et al. (1988) Cell 52:713-722; Deuschle et al. (1989) Proc. Natl. Acad. Sci. USA 86:5400-5404; Fuerst et al. (1989) Proc. Nail. Acad. Sci. USA 86:2549-2553; Deuschle et al. (1990) Science 248:480-483; Gossen (1993) Ph.D. Thesis, University of Heidelberg; Reines et al. (1993) Proc. Natl. Acad. Sci. USA 90:1917-1921; Labow et al. (1990) Mol. Cell. Biol. 10:3343-3356; Zambretti et al. (1992) Proc. Natl. Acad. Sci. USA 89:3952-3956; Baim et al. (1991) Proc. Natl. Acad. Sci. USA 88:5072-5076; Wyborski et al. (1991) Nucleic Acids Res. 19:4647-4653; Hillenand-Wissman (1989) Topics Mol. Struc. Biol. 10:143-162; Degenkolb et al. (1991) Antimicrob. Agents Chemother. 35:1591-1595; Kleinschnidt et al. (1988) Biochemistry 27:1094-1104; Bonin (1993) Ph.D. Thesis, University of Heidelberg; Gossen et al. (1992) Proc. Natl. Acad. Sci. USA 89:5547-5551; Oliva et al. (1992) Antimicrob. Agents Chemother. 36:913-919; Hlavka et al. (1985) Handbook of Experimental Pharmacology, Vol. 78 (Springer-Verlag, Berlin); Gill et al. (1988) Nature 334:721-724. Such disclosures are herein incorporated by reference. The above list of selectable marker genes is not meant to be limiting. Any selectable marker gene can be used in the compositions presented herein.

[0114] F. Plants

[0115] Compositions comprising a transformed plant cell, a plant and a transgenic seed are further provided. In one embodiment, the transformed plant cell, plant or transgenic seed comprise a recombinant expression construct comprising a polynucleotide of interest having a sequence closely related to a target sequence (i.e an endogenous sequence) and a recombinant miRNA expression construct, wherein the recombinant miRNA expression construct encodes a miRNA consisting of 21-nucleotides and said miRNA when expressed in the plant cell reduces the level of mRNA of the target sequence (i.e. an endogenous sequence) without reducing the level of mRNA of the polynucleotide of interest.

[0116] It is recognized that the miRNA encoded by the recombinant miRNA expression construct can target any target sequence. In non-limiting embodiments, the target sequence encodes a member of the phosphoenolpyruvate carboxylase protein family or RUBISCO Activase 1. Any of the various miRNA precursor backbones, as described elsewhere herein, can be used in the recombinant miRNA expression constructs introduced into the plant cell, plant or seed. In addition, any of the various polynucleotides of interest discussed elsewhere herein (i.e. a native polynucleotide, a transgene, a shuffled variant of the target sequence, or any polynucleotide having a sequence closely related to the target sequence), can be used in the recombinant expression construct and expressed in the plant cell, plant or seed. In another embodiment, the encoded miRNA corresponds to a complement of a region of the mRNA of the target sequence such that the region has 3 or fewer non-complementary nucleotides to the 21-nt miRNA and the miRNA comprises 5 or more non-complementary nucleotides to any given region across the length of the mRNA encoded by the polynucleotide of interest. In specific embodiments, the complement of the region of mRNA of the target sequence can comprise 2 non-complementary nucleotides to the 21-nt miRNA, 1 non-complementary nucleotide to the 21-nt miRNA or has 100% sequence complementarity to the 21-nt-miRNA.

[0117] In some embodiments, the recombinant expression construct and the recombinant miRNA expression construct can be integrated into the genome of the plant cell on the same polynucleotide construct. Alternatively, the recombinant expression construct and the recombinant miRNA expression construct can be integrated into the genome of the plant cell on different polynucleotide constructs.

[0118] As used herein, “plant” includes reference to whole plants, plant organs, plant tissues, seeds and plant cells and progeny of same. Plant cells include, without limitation, cells from seeds, suspension cultures, embryos, meristematic regions, callus tissue, leaves, roots, shoots, gametophytes, sporophytes, pollen, and microspores. The term “plant tissue” includes differentiated and undifferentiated tissues including, but not limited to the following: roots, stems, shoots, leaves, pollen, seeds, tumor tissue and various forms of cells and culture (e.g., single cells, protoplasts, embryos and callus tissue). The plant tissue may be in plant or in a plant organ, tissue or cell culture.

[0119] A transformed plant or transformed plant cell provided herein is one in which genetic alteration, such as transformation, has been affected as to a gene of interest, or is a plant or plant cell which is descended from a plant or cell so altered and which comprises the alteration. A “transgene” is a gene that has been introduced into the genome by a transformation procedure. Accordingly, a “transgenic plant” is a plant that contains a transgene, whether the transgene was introduced into that particular plant by transformation or by breeding; thus, descendants of an originally-transformed plant are encompassed by the definition. A “control” or “control plant” or “control plant cell” provides a reference point for measuring changes in phenotype of the subject plant or plant cell. A control plant or plant cell may comprise, for example: (a) a wild-type plant or cell, i.e., of the same genotype as the starting material for the genetic alteration which resulted in the subject plant or cell; (b) a plant or plant cell of the same genotype as the starting material but which has been transformed with a null construct (i.e., with a construct which does not express the miRNA and/or a construct which does not express the polynucleotide of interest, such as a construct comprising a marker gene); (c) a plant or plant cell which is a non-transformed segregant among progeny of a subject plant or plant cell; (d) a plant or plant cell genetically identical to the subject plant or plant cell but which is not exposed to conditions or stimuli that would induce expression of the miRNA; or (e) the subject plant or plant cell itself, under conditions in which the recombinant miRNA expression construct and/or the recombinant expression construct comprising a polynucleotide of interest is not expressed.

[0120] Plant cells that have been transformed to have a recombinant expression construct and/or a recombinant miRNA expression construct provided herein can be grown into whole plants. The regeneration, development, and cultivation of plants from single plant protoplast transformants or from various transformed explants is well known in the art. See, for example, McCormick et al. (1986) Plant Cell Reports 5:81-84; Weissbach and Weissbach, In: Methods for Plant Molecular Biology, (Eds.), Academic Press, Inc. San Diego, Calif., (1988). This regeneration and growth process typically includes the steps of selection of transformed cells, culturing those individualized cells through the usual stages of embryonic development through the rooted plantlet stage. Transgenic embryos and seeds are similarly regenerated. The resulting transgenic rooted shoots are thereafter planted in an appropriate plant growth medium such as soil. Preferably, the regenerated plants are self-pollinated to provide homozygous transgenic plants. Otherwise, pollen obtained from the regenerated plants is crossed to seed-grown plants of agronomically important lines. Conversely, pollen from plants of these important lines is used to pollinate regenerated plants. Two or more generations may be grown to ensure that expression of the desired phenotypic characteristic is stably maintained and inherited and then seeds harvested to ensure expression of the desired phenotypic characteristic has been achieved. In this manner, the compositions presented herein provide transformed seed (also referred to as “transgenic seed”) having a polynucleotide provided herein, for example, a recombinant miRNA expression construct, stably incorporated into their genome.

[0121] The recombinant expression constructs and recombinant miRNA expression constructs provided herein may be used for transformation of any plant species, including, but not limited to, monocots (e.g., maize, sugarcane, wheat, rice, barley, sorghum, or rye) and dicots (e.g., soybean, Brassica, sunflower, cotton, or alfalfa). Examples of plant species of interest include, but are not limited to, corn (Zea mays), Brassica sp. (e.g., B. napus, B. rapa, B. juncea), particularly those Brassica species useful as sources of seed oil, alfalfa (Medicago sativa), rice (Oryza sativa), rye (Secale cereale), sorghum (Sorghum bicolor, Sorghum vulgare), millet (e.g., pearl millet (Pennisetum glaucum), proso millet (Panicum miliaceum), foxtail millet (Setaria italica), finger millet (Eleusine coracana)), sunflower (Helianthus annuus), safflower (Carthamus tinctorius), wheat (Triticum aestivum), soybean (Glycine max), tobacco (Nicotiana tabacum), potato (Solanum tuberosum), peanuts (Arachis hypogaea), cotton (Gossypium barbadense, Gossypium hirsutum), sweet potato (Ipomoea batatus), cassaya (Manihot esculenta), coffee (Coffea spp.), coconut (Cocos nucifera), pineapple (Ananas comosus), citrus trees (Citrus spp.), cocoa (Theobroma cacao), tea (Camellia sinensis), banana (Musa spp.), avocado (Persea americana), fig (Ficus casica), guava (Psidium guajava), mango (Mangifera indica), olive (Olea europaea), papaya (Carica papaya), cashew (Anacardium occidentale), macadamia (Macadamia integrifolia), almond (Prunus amygdalus), sugar beets (Beta vulgaris), sugarcane (Saccharum spp.), oats, barley, vegetables, ornamentals, and conifers.

[0122] Vegetables include tomatoes (Lycopersicon esculentum), lettuce (e.g., Lactuca sativa), green beans (Phaseolus vulgaris), lima beans (Phaseolus limensis), peas (Lathyrus spp.), and members of the genus Cucumis such as cucumber (C. sativus), cantaloupe (C. cantalupensis), and musk melon (C. melo). Ornamentals include azalea (Rhododendron spp.), hydrangea (Macrophylla hydrangea), hibiscus (Hibiscus rosasanensis), roses (Rosa spp.), tulips (Tulipa spp.), daffodils (Narcissus spp.), petunias (Petunia hybrida), carnation (Dianthus caryophyllus), poinsettia (Euphorbia pulcherrima), and chrysanthemum.

[0123] Conifers that may be employed herein include, for example, pines such as loblolly pine (Pinus taeda), slash pine (Pinus elliotii), ponderosa pine (Pinus ponderosa), lodgepole pine (Pinus contorta), and Monterey pine (Pinus radiata); Douglas-fir (Pseudotsuga menziesii); Western hemlock (Tsuga canadensis); Sitka spruce (Picea glauca); redwood (Sequoia sempervirens); true firs such as silver fir (Abies amabilis) and balsam fir (Abies balsamea); and cedars such as Western red cedar (Thuja plicata) and Alaska yellow-cedar (Chamaecyparis nootkatensis). In specific embodiments, plants provided herein are crop plants (for example, corn, alfalfa, sunflower, Brassica, soybean, cotton, safflower, peanut, sorghum, wheat, millet, tobacco, etc.). In other embodiments, corn and soybean plants are optimal, and in yet other embodiments soybean plants are optimal.

[0124] Other plants of interest include grain plants that provide seeds of interest, oil-seed plants, and leguminous plants. Seeds of interest include grain seeds, such as corn, wheat, barley, rice, sorghum, rye, etc. Oil-seed plants include cotton, soybean, safflower, sunflower, Brassica, maize, alfalfa, palm, coconut, etc. Leguminous plants include beans and peas. Beans include guar, locust bean, fenugreek, soybean, garden beans, cowpea, mungbean, lima bean, fava bean, lentils, chickpea, etc.

[0125] Depending on the target sequence, the transgenic plants, plant cells, or seeds expressing a recombinant expression construct and/or a recombinant miRNA expression construct provided herein may have a change in phenotype, including, but not limited to, an altered pathogen or insect defense mechanism, an increased resistance to one or more herbicides, an increased ability to withstand stressful environmental conditions, a modified ability to produce starch, a modified level of starch production, a modified oil content and/or composition, a modified carbohydrate content and/or composition, a modified fatty acid content and/or composition, a modified ability to utilize, partition and/or store nitrogen, and the like.

### III. Methods of Introducing

[0126] The methods provided herein comprise introducing into a plant cell, plant or seed a recombinant expression construct comprising a polynucleotide of interest and a recombinant miRNA expression construct encoding a 21-nt miRNA. Any of the various polynucleotides of interest, recombinant miRNA expression constructs or active variants and fragments thereof provided herein can be introduced into the plant cell, plant or seed.

[0127] In some embodiments, the recombinant miRNA expression construct and the recombinant expression construct comprising the polynucleotide of interest are introduced to the plant cell on the same polynucleotide construct. Alternatively, the recombinant miRNA expression construct and the recombinant expression construct are introduced into the plant cell on different polynucleotide constructs.

[0128] The methods provided herein do not depend on a particular method for introducing a sequence into the host cell, only that the polynucleotide gains access to the interior of a least one cell of the host. Methods for introducing polynucleotides into host cells (i.e. plants) are known in the art and include, but are not limited to, stable transformation methods, transient transformation methods, and virus-mediated methods.

[0129] The terms “introducing” and “introduced” are intended to mean providing a nucleic acid (e.g., a recombinant expression construct and/or recombinant miRNA expression construct or active variants or fragments thereof) or protein into a cell. Introduced includes reference to the incorporation of a nucleic acid into a eukaryotic or prokaryotic cell where the nucleic acid may be incorporated into the genome of the cell, and includes reference to the transient provision of a nucleic acid or protein to the cell. Introduced includes reference to stable or transient transformation methods, as well as sexually crossing. Thus, “introduced” in the context of inserting a nucleic acid fragment (e.g., a recombinant expression construct and/or recombinant miRNA expression construct or active variants or fragments thereof) into a cell, means “transfection” or “transformation” or “transduction” and includes reference to the incorporation of a nucleic acid fragment into a eukaryotic or prokaryotic cell where the nucleic acid fragment may be incorporated into the genome of the cell (e.g., chromosome, plasmid, plastid, or mitochondrial DNA), converted into an autonomous replicon, or transiently expressed (e.g., transfected mRNA).

[0130] “Stable transformation” is intended to mean that the nucleotide construct introduced into a host (i.e., a plant) integrates into the genome of the plant and is capable of being inherited by the progeny thereof “Transient transformation” is intended to mean that a polynucleotide is introduced into the host (i.e., a plant) and expressed temporally.

[0131] Transformation protocols as well as protocols for introducing polynucleotide sequences into plants may vary depending on the type of plant or plant cell, i.e., monocot or dicot, targeted for transformation. Suitable methods of introducing polynucleotides into plant cells include microinjection (Crossway et al. (1986) Biotechniques 4:320-334), electroporation (Riggs et al. (1986) Proc. Natl. Acad. Sci. USA 83:5602-5606, Agrobacterium-mediated transformation (Townsend et al., U.S. Pat. No. 5,563,055; Zhao et al., U.S. Pat. No. 5,981,840), direct gene transfer (Paszkowski et al. (1984) EMBO J. 3:2717-2722), and ballistic particle acceleration (see, for example, Sanford et al., U.S. Pat. No. 4,945,050; Tomes et al., U.S. Pat. No. 5,879,918; Tomes et al., U.S. Pat. No. 5,886,244; Bidney et al., U.S. Pat. No. 5,932,782; Tomes et al. (1995) “Direct DNA Transfer into Intact Plant Cells via Microprojectile Bombardment,” in Plant Cell, Tissue, and Organ Culture Fundamental Methods, ed. Gamborg and Phillips (Springer-Verlag, Berlin); McCabe et al. (1988) Biotechnology 6:923-926); and Lec1 transformation (WO 00/28058). Also see Weissinger et al. (1988) Ann. Rev. Genet. 22:421-477; Sanford et al. (1987) Particulate Science and Technology 5:27-37 (onion); Christou et al. (1988) Plant Physiol. 87:671-674 (soybean); McCabe et al. (1988) Bio/Technology 6:923-926 (soybean); Finer and McMullen (1991) In Vitro Cell Dev. Biol. 27P:175-182 (soybean); Singh et al. (1998) Theor. Appl. Genet. 96:319-324 (soybean); Datta et al. (1990) Biotechnology 8:736-740 (rice); Klein et al. (1988) Proc. Natl. Acad. Sci. USA 85:4305-4309 (maize); Klein et al. (1988) Biotechnology 6:559-563 (maize); Tomes, U.S. Pat. No. 5,240,855; Buising et al., U.S. Pat. Nos. 5,322,783 and 5,324,646; Tomes et al. (1995) “Direct DNA Transfer into Intact Plant Cells via Microprojectile Bombardment,” in Plant Cell, Tissue, and Organ Culture: Fundamental Methods, ed. Gamborg (Springer-Verlag, Berlin) (maize); Klein et al. (1988) Plant Physiol. 91:440-444 (maize); Fromm et al. (1990) Biotechnology 8:833-839 (maize); Hooykaas-Van Slogteren et al. (1984) Nature (London) 311:763-764; Bowen et al., U.S. Pat. No. 5,736,369 (cereals); Bytebier et al. (1987) Proc. Natl. Acad. Sci. USA 84:5345-5349 (Liliaceae); De Wet et al. (1985) in The Experimental Manipulation of Ovule Tissues, ed. Chapman et al. (Longman, New York), pp. 197-209 (pollen); Kaeppler et al. (1990) Plant Cell Reports 9:415-418 and Kaeppler et al. (1992) Theor. Appl. Genet. 84:560-566 (whisker-mediated transformation); D'Halluin et al. (1992) Plant Cell 4:1495-1505 (electroporation); Li et al. (1993) Plant Cell Reports 12:250-255 and Christou and Ford (1995) Annals of Botany 75:407-413 (rice); Osjoda et al. (1996) Nature Biotechnology 14:745-750 (maize via Agrobacterium tumefaciens); all of which are herein incorporated by reference.

[0132] In specific embodiments, the recombinant expression constructs and/or the recombinant miRNA expression constructs disclosed herein can be provided to a plant using a variety of transient transformation methods. Such transient transformation methods include, but are not limited to, the introduction of the recombinant expression constructs or the recombinant miRNA expression constructs or variants thereof directly into the plant. Such methods include, for example, microinjection or particle bombardment. See, for example, Crossway et al. (1986) Mol. Gen. Genet. 202:179-185; Nomura et al. (1986) Plant Sci. 44:53-58; Hepler et al. (1994) Proc. Natl. Acad. Sci. 91: 2176-2180 and Hush et al. (1994) The Journal of Cell Science 107:775-784, all of which are herein incorporated by reference. Alternatively, the polynucleotides can be transiently transformed into the plant using techniques known in the art. Such techniques include viral vector system and the precipitation of the polynucleotide in a manner that precludes subsequent release of the DNA. Thus, the transcription from the particle-bound DNA can occur, but the frequency with which it is released to become integrated into the genome is greatly reduced. Such methods include the use of particles coated with polyethylimine (PEI; Sigma #P3143).

[0133] In other embodiments, recombinant expression constructs and recombinant miRNA expression constructs disclosed herein may be introduced into plants by contacting plants with a virus or viral nucleic acids. Generally, such methods involve incorporating a nucleotide construct provided herein within a viral DNA or RNA molecule. Methods for introducing polynucleotides into plants and expressing a protein encoded therein, involving viral DNA or RNA molecules, are known in the art. See, for example, U.S. Pat. Nos. 5,889,191, 5,889,190, 5,866,785, 5,589,367, 5,316,931, and Porta et al. (1996) Molecular Biotechnology 5:209-221; herein incorporated by reference.

[0134] Methods are known in the art for the targeted insertion of a polynucleotide at a specific location in the plant genome. In one embodiment, the insertion of the polynucleotide at a desired genomic location is achieved using a site-specific recombination system. See, for example, WO99/25821, WO99/25854, WO99/25840, WO99/25855, and WO99/25853, all of which are herein incorporated by reference. Briefly, the recombinant expression constructs and/or recombinant miRNA expression constructs provided herein can be contained in a transfer cassette flanked by two non-identical recombination sites. The transfer cassette is introduced into a plant having stably incorporated into its genome a target site which is flanked by two non-identical recombination sites that correspond to the sites of the transfer cassette. An appropriate recombinase is provided and the transfer cassette is integrated at the target site. The recombinant expression construct and/or the recombinant miRNA expression construct is thereby integrated at a specific chromosomal position in the plant genome.

[0135] The cells that have been transformed may be grown into plants in accordance with conventional ways. See, for example, McCormick et al. (1986) Plant Cell Reports 5:81-84. These plants may then be grown, and either pollinated with the same transformed strain or different strains, and the resulting progeny having constitutive expression of the desired phenotypic characteristic identified. Two or more generations may be grown to ensure that expression of the desired phenotypic characteristic is stably maintained and inherited and then seeds harvested to ensure expression of the desired phenotypic characteristic has been achieved. In this manner, transformed seed (also referred to as “transgenic seed”) having a recombinant expression construct and/or a recombinant miRNA expression construct disclosed herein, stably incorporated into their genome is provided.

### IV. Methods of Use

[0136] A method of reducing the level of mRNA of a target sequence in a plant cell, plant or seed by introducing into a plant cell, plant or seed a recombinant expression construct comprising a polynucleotide of interest and a recombinant miRNA expression construct encoding a 21-nt miRNA is provided. In such methods, the level of mRNA of the target sequence (i.e. an endogenous sequence) is reduced relative to the level of mRNA of the target sequence (i.e an endogenous sequence) in the absence of transcription of the recombinant miRNA expression construct and the level of mRNA of the polynucleotide of interest is not reduced relative to the level of mRNA of the polynucleotide of interest in the absence of transcription of the recombinant miRNA expression construct.

[0137] It is recognized that any miRNA that reduces the level of expression of the target sequence but does not reduce the level of mRNA of the polynucleotide of interest could be used in the methods provided herein. In addition, any of the various polynucleotides of interest disclosed herein (i.e. a native polynucleotide, a transgene, a shuffled variant of the target sequence, or any polynucleotide having a sequence closely related to the target sequence) can be used in the methods provided. In such methods, the encoded miRNA corresponds to a complement of a region of the mRNA of the target sequence wherein the region can have 3 or fewer non-complementary nucleotides to the 21-nt miRNA, 2 non-complementary nucleotides to the 21-nt miRNA, 1 non-complementary nucleotide to the 21-nt miRNA or 100% sequence complementarity to the 21-nt miRNA. In such cases, the miRNA comprises 5 or more non-complementary nucleotides to any given region across the length of the mRNA encoded by the polynucleotide of interest.

[0138] It is recognized that the miRNA encoded by the recombinant miRNA expression construct used in the methods can target any target sequence. In non-limiting embodiments, the target sequence encodes a member of the phosphoenolpyruvate carboxylase protein family or RUBISCO Activase 1. Any of the various miRNA precursor backbones, as described elsewhere herein, can be used in the recombinant miRNA expression constructs in the methods provided herein.

[0139] In the methods provided herein, the polynucleotide of interest and the recombinant miRNA expression construct can be present on the same polynucleotide construct or, alternatively, can be on different polynucleotide constructs. In specific embodiments, the recombinant expression construct comprises the polynucleotide of interest operably linked to a first promoter and the sequence encoding the recombinant miRNA expression construct is operably linked to a second promoter, wherein the first and second promoters are active in a plant. Alternatively, in some embodiments of the methods, the polynucleotide of interest of the recombinant expression construct and the miRNA expression construct are operably linked to the same promoter.

[0140] The methods provided herein can be used in any plant. In specific embodiments, the plant comprises a dicot or a monocot and in further embodiments, the dicot is soybean, Brassica, sunflower, cotton or alfalfa and the monocot is maize, sugarcane, wheat, rice, barley, sorghum or rye.

[0141] Any appropriate method can be used to assay for a reduced level of expression of a target sequence. For example, evaluation of reduced expression of a target nucleic acid in a plant or plant part, may be accomplished by a variety of means such as Northern analysis of mRNA expression, Western analysis of protein expression, or phenotypic analysis based on the function of the encoded proteins. In some embodiments, levels of other plant by-products such as oil can be analyzed as an indicator of a reduced level of expression of two or more sequences. Expression products of a target sequence can be detected in any of a variety of ways, depending upon the nature of the product (e.g., Western blot and enzyme assay). The level of expression of the polynucleotide of interest, whose level of mRNA is not reduced by the miRNA, can also be assayed by the above methods.

### V. Variants, Fragments and Sequence Comparisons

[0142] The methods and compositions provided herein employ a variety of different components. It is recognized throughout the description that some components can have active variants and fragments. Such components include, for example, any of the polynucleotides of interest, or any of the recombinant miRNA expression constructs or one of its components, such as the miRNA precursor backbone, the miRNA, or the star sequence (i.e. SEQ ID NOS: 1-21). Biological activity for each of these components is described elsewhere herein.

[0143] Active variants of the polynucleotides employed in the compositions and methods are further encompassed. For example, active variants of the polynucleotides of interest or any of the recombinant miRNA expression constructs or one of its components, such as the miRNA precursor backbone, the miRNA, or the star sequence are encompassed herein. “Variants” refer to substantially similar sequences. For polynucleotides, a variant comprises a deletion and/or addition of one or more nucleotides at one or more internal sites within the polynucleotide and/or a substitution of one or more nucleotides at one or more sites in the polynucleotide. Variants of the polynucleotides of interest, recombinant miRNA expression constructs, miRNA precursor backbones, miRNAs, and/or star sequences disclosed herein may retain activity of the polynucleotide of interest, recombinant miRNA expression construct, miRNA precursor backbone, miRNA, and/or star sequence as described in detail elsewhere herein. Variant polynucleotides can include synthetically derived polynucleotides, such as those generated, for example, by using site-directed mutagenesis. Generally, variants of a polynucleotide of interest, recombinant miRNA expression construct, miRNA precursor backbone, miRNA, and/or star sequence disclosed herein will have at least about 60%, 65%, 70%, 75%, 80%, 85%, 90%, 91%, 92%, 93%, 94%, 95%, 96%, 97%, 98%, 99% or more sequence identity to that particular polynucleotide as determined by sequence alignment programs and parameters described elsewhere herein.

[0144] Fragments of the polynucleotides of interest are also encompassed herein. By “fragment” is intended a portion of the polynucleotide or a portion of the amino acid sequence and hence protein encoded thereby. Fragments of a polynucleotide may encode protein fragments that retain the biological activity of the native protein. As used herein, a “native” polynucleotide or polypeptide comprises a naturally occurring nucleotide sequence or amino acid sequence, respectively. Thus, fragments of a polynucleotide may range from at least about 20 nucleotides, about 50 nucleotides, about 100 nucleotides, and up to the full-length polynucleotide. A fragment of a polynucleotide that encodes a biologically active portion of a protein employed in the methods or compositions will encode at least 15, 25, 30, 50, 100, 150, 200, or 250 contiguous amino acids, or up to the total number of amino acids present in a full-length protein. Alternatively, fragments of a polynucleotide that are useful as a hybridization probe or primer generally do not encode fragment proteins retaining biological activity. Thus, fragments of a nucleotide sequence may range from at least about 10, 20, 30, 40, 50, 60, 70, 80 nucleotides or up to the full length sequence.

[0145] A biologically active portion of a polypeptide can be prepared by isolating a portion of one of the polynucleotides encoding the portion of the polypeptide of interest and expressing the encoded portion of the protein (e.g., by recombinant expression in vitro), and assessing the activity of the portion of the polypeptide. For example, polynucleotides that encode fragments of a polypeptide of interest can comprise a nucleotide sequence comprising at least 16, 20, 50, 75, 100, 150, 200, 250, 300, 350, 400, 450, 500, 550, 600, 650, 700, 800, 900, 1,000, 1,100, 1,200, 1,300, or 1,400 nucleotides, or up to the number of nucleotides present in a nucleotide sequence employed in the methods and compositions provided herein.

[0146] Methods of alignment of sequences for comparison are well known in the art. Thus, the determination of percent sequence identity between any two sequences can be accomplished using a mathematical algorithm. Non-limiting examples of such mathematical algorithms are the algorithm of Myers and Miller (1988) CABIOS 4:11-17; the local alignment algorithm of Smith et al. (1981) Adv. Appl. Math. 2:482; the global alignment algorithm of Needleman and Wunsch (1970) J. Mol. Biol. 48:443-453; the search-for-local alignment method of Pearson and Lipman (1988) Proc. Natl. Acad. Sci. 85:2444-2448; the algorithm of Karlin and Altschul (1990) Proc. Natl. Acad. Sci. USA 872264, modified as in Karlin and Altschul (1993) Proc. Natl. Acad. Sci. USA 90:5873-5877.

[0147] Computer implementations of these mathematical algorithms can be utilized for comparison of sequences to determine sequence identity. Such implementations include, but are not limited to: CLUSTAL in the PC/Gene program (available from Intelligenetics, Mountain View, Calif.); the ALIGN program (Version 2.0) and GAP, BESTFIT, BLAST, FASTA, and TFASTA in the GCG Wisconsin Genetics Software Package, Version 10 (available from Accelrys Inc., 9685 Scranton Road, San Diego, Calif., USA). Alignments using these programs can be performed using the default parameters. The CLUSTAL program is well described by Higgins et al. (1988) Gene 73:237-244 (1988); Higgins et al. (1989) CABIOS 5:151-153; Corpet et al. (1988) Nucleic Acids Res. 16:10881-90; Huang et al. (1992) CABIOS 8:155-65; and Pearson et al. (1994) Meth. Mol. Biol. 24:307-331. The BLAST programs of Altschul et al (1990) J. Mol. Biol. 215:403 are based on the algorithm of Karlin and Altschul (1990) supra. BLAST nucleotide searches can be performed with the BLASTN program, score=100, wordlength=12, to obtain nucleotide sequences homologous to a nucleotide sequence provided herein. To obtain gapped alignments for comparison purposes, Gapped BLAST (in BLAST 2.0) can be utilized as described in Altschul et al. (1997) Nucleic Acids Res. 25:3389. Alternatively, PSI-BLAST (in BLAST 2.0) can be used to perform an iterated search that detects distant relationships between molecules. See Altschul et al. (1997) supra. When utilizing BLAST, Gapped BLAST, PSI-BLAST, the default parameters of the respective programs (e.g., BLASTN for nucleotide sequences, BLASTX for proteins) can be used. See www.ncbi.nlm.nih.gov. Alignment may also be performed manually by inspection.

[0148] Unless otherwise stated, sequence identity/similarity values provided herein refer to the value obtained using GAP Version 10 using the following parameters: % identity and % similarity for a nucleotide sequence using GAP Weight of 50 and Length Weight of 3, and the nwsgapdna.cmp scoring matrix; % identity and % similarity for an amino acid sequence using GAP Weight of 8 and Length Weight of 2, and the BLOSUM62 scoring matrix. By “equivalent program” is intended any sequence comparison program that, for any two sequences in question, generates an alignment having identical nucleotide or amino acid residue matches and an identical percent sequence identity when compared to the corresponding alignment generated by GAP Version 10.

[0149] Units, prefixes, and symbols may be denoted in their SI accepted form. Unless otherwise indicated, nucleic acids are written left to right in 5′ to 3′ orientation; amino acid sequences are written left to right in amino to carboxy orientation, respectively. Numeric ranges are inclusive of the numbers defining the range Amino acids may be referred to herein by either their commonly known three letter symbols or by the one-letter symbols recommended by the IUPAC-IUB Biochemical Nomenclature Commission. Nucleotides, likewise, may be referred to by their commonly accepted single-letter codes. The above-defined terms are more fully defined by reference to the specification as a whole.

[0150] Non-limiting examples of methods and compositions disclosed herein are as follows:

1. A polynucleotide construct comprising

[0151] (a) a first element comprising a recombinant expression construct comprising a polynucleotide of interest having at least 80% sequence identity to a target sequence; and,

[0152] (b) a second element comprising a recombinant miRNA expression construct,

wherein said recombinant miRNA expression construct encodes a miRNA consisting of 21 nucleotides (21-nt) and wherein said miRNA when expressed in a plant cell reduces the level of mRNA of the target sequence without reducing the level of mRNA of said first element.
2. The polynucleotide construct of embodiment 1, wherein said encoded miRNA corresponds to a complement of a region of the mRNA of the target sequence, wherein said region has 3 or fewer non-complementary nucleotides to said 21-nt miRNA; and, wherein said miRNA comprises 5 or more non-complementary nucleotides to any given region across the length of the mRNA encoded by the polynucleotide of interest.
3. The polynucleotide construct of embodiment 2, wherein said complement of a region of the mRNA of the target sequence comprises

[0153] (a) 2 non-complementary nucleotides to said 21-nt miRNA;

[0154] (b) 1 non-complementary nucleotide to said 21-nt miRNA; or

[0155] (c) 100% sequence complementarity to said 21-nt miRNA.

4. The polynucleotide construct of any one of embodiments 1-3, wherein the target sequence is endogenous to said plant cell.
5. The polynucleotide construct of any one of embodiments 1-4, wherein

[0156] (a) said first element comprises a first promoter operably linked to said sequence encoding the polynucleotide of interest; and

[0157] (b) said second element comprises a second promoter operably linked to said sequence encoding the recombinant miRNA expression construct;

[0158] wherein said first and second promoters are active in a plant.

6. The polynucleotide construct of any one of embodiments 1-4, wherein said first element and said second element are operably linked to the same promoter.
7. The polynucleotide construct of any one of embodiments 1-6, wherein said polynucleotide of interest is a shuffled variant of the target sequence.
8. The polynucleotide construct of embodiment 7, wherein said target sequence encodes a member of the phosphoenolpyruvate carboxylase protein family.
9. The polynucleotide construct of embodiment 7, wherein said target sequence encodes RUBISCO Activase 1.
10. A transformed plant cell comprising

[0159] (a) a recombinant expression construct comprising a polynucleotide of interest having at least 80% sequence identity when compared to an endogenous target sequence expressed in said plant cell; and,

[0160] (b) a recombinant miRNA expression construct capable of being transcribed into an RNA sequence in said plant cell,

[0161] wherein said recombinant miRNA expression construct encodes a miRNA consisting of 21 nucleotides (21-nt) and wherein said miRNA when expressed in said plant cell reduces the level of mRNA of said endogenous target sequence without reducing the level of mRNA of said polynucleotide of interest.

11. The transformed plant cell of embodiment 10, wherein said encoded miRNA corresponds to a complement of a region of the mRNA of the target sequence, wherein said region has 3 or fewer non-complementary nucleotides to said 21-nt miRNA; and,

[0162] wherein said miRNA comprises 5 or more non-complementary nucleotides to any given region across the length of the mRNA encoded by the polynucleotide of interest.

12. The transformed plant cell of embodiment 11, wherein said complement of a region of the mRNA of the target sequence comprises

[0163] (a) 2 non-complementary nucleotides to said 21-nt miRNA;

[0164] (b) 1 non-complementary nucleotide to said 21-nt miRNA; or

[0165] (c) 100% sequence complementarity to said 21-nt miRNA.

13. The transformed plant cell of any one of embodiments 10-12, wherein said recombinant expression construct comprising the polynucleotide of interest and said recombinant miRNA expression construct are integrated into the genome of the plant cell on the same polynucleotide construct.
14. The transformed plant cell of any one of embodiments 10-12, wherein said recombinant expression construct and said recombinant miRNA expression construct are integrated into the genome of the plant cell on different polynucleotide constructs.
15. The transformed plant cell of any one of embodiments 10-14, wherein said polynucleotide of interest is a shuffled variant of the target sequence.
16. The transformed plant cell of embodiment 15, wherein said target sequence encodes a member of the phosphoenolpyruvate carboxylase protein family.
17. The transformed plant cell of embodiment 15, wherein said target sequence encodes RUBISCO Activase 1.
18. A plant comprising the transformed plant cell of any one of embodiments 10-17.
19. A transgenic seed comprising the transformed plant cell of any one of embodiments 10-17.
20. The transformed plant cell of any one of embodiments 10-17, wherein said plant cell is from a dicot.
21. The transformed plant cell of embodiment 20, wherein said dicot is soybean, Brassica, sunflower, cotton, or alfalfa.
22. The transformed plant cell of any one of embodiments 10-17, wherein said plant cell is from a monocot.
23. The transformed plant cell of embodiment 22, wherein said monocot is maize, sugarcane, wheat, rice, barley, sorghum, or rye.
24. A method of reducing the level of mRNA of a target sequence in a plant cell comprising introducing into a plant cell

[0166] (a) a recombinant expression construct comprising a polynucleotide of interest having at least 80% sequence identity to an endogenous target sequence operably linked to a promoter active in the plant cell; and

[0167] (b) a recombinant miRNA expression construct, wherein said recombinant miRNA expression construct encodes a miRNA consisting of 21 nucleotides (21-nt);

[0168] wherein the level of mRNA of said endogenous target sequence is reduced relative to the level of mRNA of the endogenous target sequence in the absence of transcription of said recombinant miRNA expression construct, and wherein the level of mRNA of said polynucleotide of interest is not reduced relative to the level of mRNA of said polynucleotide of interest in the absence of transcription of said recombinant miRNA expression construct.

25. The method of embodiment 24, wherein said recombinant expression construct comprising said polynucleotide of interest and said recombinant miRNA expression construct are introduced into said plant cell on the same polynucleotide construct.
26. The method of embodiment 24, wherein said recombinant expression construct comprising said polynucleotide of interest and said recombinant miRNA expression construct are introduced into said plant cell on different polynucleotide constructs.
27. The method of any one of embodiments 24-26, wherein said encoded miRNA corresponds to a complement of a region of the mRNA of the target sequence, wherein said region has 3 or fewer non-complementary nucleotides to said 21-nt miRNA; and,

[0169] wherein said miRNA comprises 5 or more non-complementary nucleotides to any given region across the length of the mRNA encoded by the polynucleotide of interest.

28. The method of embodiment 27, wherein said complement of a region of the mRNA of the target sequence comprises

[0170] (a) 2 non-complementary nucleotides to said 21-nt miRNA;

[0171] (b) 1 non-complementary nucleotide to said 21-nt miRNA; or

[0172] (c) 100% sequence complementarity to said 21-nt miRNA.

29. The method of any one of embodiments 24-28, wherein

[0173] (a) said recombinant expression construct comprises said polynucleotide of interest operably linked to a first promoter; and

[0174] (b) said sequence encoding said recombinant miRNA expression construct is operably linked to a second promoter,

[0175] wherein said first and second promoters are active in a plant.

30. The method of any one of embodiments 24-28, wherein said recombinant expression construct and said recombinant miRNA expression construct are operably linked to the same promoter.
31. The method of any one of embodiments 24-30, wherein said polynucleotide of interest is a shuffled variant of the target sequence.
32. The method of embodiment 31, wherein said target sequence encodes a member of the phosphoenolpyruvate carboxylase protein family.
33. The method of embodiment 31, wherein said target sequence encodes RUBISCO Activase 1.
34. The method of any one of embodiments 24-33, wherein said plant cell is from a dicot.
35. The method of embodiment 34, wherein said dicot is soybean, Brassica, sunflower, cotton, or alfalfa.
36. The method of any one of embodiments 24-33, wherein said plant cell is from a monocot.
37. The method of embodiment 36, wherein said monocot is maize, sugarcane, wheat, rice, barley, sorghum, or rye.

### EXPERIMENTAL

[0176] The following examples are offered to illustrate, but not to limit, the claimed invention. It is understood that the examples and embodiments described herein are for illustrative purposes only, and persons skilled in the art will recognize various reagents or parameters that can be altered without departing from the spirit of the invention or the scope of the appended claims.

### Example 1

### Design of Artificial microRNA Sequences

[0177] Artificial microRNAs (amiRNAs) that would have the ability to silence the desired target genes are designed largely according to rules described in Schwab R, et al. (2005) Dev Cell 8: 517-27. To summarize, microRNA sequences are 21 nucleotides in length, have a “U” at their 5′-end, display 5′ instability relative to their star sequence (which is achieved by including a C or G at position 19), and have an “A” or a “U” at their 10th nucleotide. An additional requirement for artificial microRNA design is that the amiRNA have a high free delta-G as calculated using the ZipFold algorithm (Markham, N. R. & Zuker, M. (2005) Nucleic Acids Res. 33: W577-W581.) Optionally, a one base pair change can be added within the 5′ portion of the amiRNA so that the sequence differs from the target sequence by one nucleotide.

### Example 2

### Design of Artificial Star Sequences

[0178] “Star sequences” are those that base pair with the amiRNA sequences, in the precursor RNA, to form imperfect stem structures. To form a perfect stem structure the star sequence would be the exact reverse complement of the amiRNA.

[0179] A precursor sequence (Zhang et al. (2006) FEBS Lett. 580(15):3753-62) can be folded using mfold (M. Zuker (2003) Nucleic Acids Res. 31: 3406-15; and D. H. Mathews, J. et al. (1999) J. Mol. Biol. 288: 911-940). The miRNA sequence is then replaced with the amiRNA sequence and the endogenous star sequence is replaced with the exact reverse complement of the amiRNA. Artificial star sequences can be designed by introducing changes in the star sequence such that the structure of the stem remains the same as the endogenous structure. The altered sequence is then folded with mfold, and the endogenous and altered structures are compared by eye. If necessary, further alterations to the artificial star sequence can be introduced to maintain structure.

### Example 3

### Conversion of Genomic microRNA Precursors to Artificial microRNA Precursors

[0180] Genomic miRNA precursor genes can be converted to amiRNAs using overlapping PCR and the resulting DNAs can be completely sequenced and then cloned into vectors for use in transformation.

[0181] Alternatively, amiRNAs can be synthesized commercially, for example by Codon Devices, (Cambridge, Mass.). The synthesized DNA is then cloned into a vector for use in transformation.

### Example 4

### Transformation of Maize

### A. Maize Particle-Mediated DNA Delivery

[0182] A DNA construct can be introduced into maize cells capable of growth on suitable maize culture medium. Such competent cells can be from maize suspension culture, callus culture on solid medium, freshly isolated immature embryos or meristem cells. Immature embryos of the Hi-II genotype can be used as the target cells. Ears are harvested at approximately 10 days post-pollination, and 1.2-1.5 mm immature embryos are isolated from the kernels, and placed scutellum-side down on maize culture medium.

[0183] The immature embryos are bombarded from 18-72 hours after being harvested from the ear. Between 6 and 18 hours prior to bombardment, the immature embryos are placed on medium with additional osmoticum (MS basal medium, Musashige and Skoog, 1962, Physiol. Plant 15:473-497, with 0.25 M sorbitol). The embryos on the high-osmotic medium are used as the bombardment target, and are left on this medium for an additional 18 hours after bombardment.

[0184] For particle bombardment, plasmid DNA (described above) is precipitated onto 1.8 mm tungsten particles using standard CaCl2-spermidine chemistry (see, for example, Klein et al., 1987, Nature 327:70-73). Each plate is bombarded once at 600 PSI, using a DuPont Helium Gun (Lowe et al., 1995, Bio/Technol 13:677-682). For typical media formulations used for maize immature embryo isolation, callus initiation, callus proliferation and regeneration of plants, see Armstrong, C., 1994, In “The Maize Handbook”, M. Freeling and V. Walbot, eds. Springer Verlag, NY, pp 663-671.

[0185] Within 1-7 days after particle bombardment, the embryos are moved onto N6-based culture medium containing 3 mg/l of the selective agent bialaphos. Embryos, and later callus, are transferred to fresh selection plates every 2 weeks. The calli developing from the immature embryos are screened for the desired phenotype. After 6-8 weeks, transformed calli are recovered.

### B. Transformation of Maize Using Agrobacterium

[0186] Agrobacterium-mediated transformation of maize is performed essentially as described by Zhao et al., in Meth. Mol. Biol. 318:315-323 (2006) (see also Zhao et al., Mol. Breed. 8:323-333 (2001) and U.S. Pat. No. 5,981,840 issued Nov. 9, 1999, incorporated herein by reference). The transformation process involves bacterium inoculation, co-cultivation, resting, selection and plant regeneration.

### 1. Immature Embryo Preparation:

[0187] Immature maize embryos are dissected from caryopses and placed in a 2 mL microtube containing 2 mL PHI-A medium.

### 2. Agrobacterium Infection and Co-Cultivation of Immature Embryos:

[0188] 2.1 Infection Step:
[0189] PHI-A medium of (1) is removed with 1 mL micropipettor, and 1 mL of Agrobacterium suspension is added. The tube is gently inverted to mix. The mixture is incubated for 5 min at room temperature.

[0190] 2.2 Co-culture Step:
[0191] The Agrobacterium suspension is removed from the infection step with a 1 mL micropipettor. Using a sterile spatula the embryos are scraped from the tube and transferred to a plate of PHI-B medium in a 100×15 mm Petri dish. The embryos are oriented with the embryonic axis down on the surface of the medium. Plates with the embryos are cultured at 20° C., in darkness, for three days. L-Cysteine can be used in the co-cultivation phase. With the standard binary vector, the co-cultivation medium supplied with 100-400 mg/L L-cysteine is critical for recovering stable transgenic events.

### 3. Selection of Putative Transgenic Events:

[0192] To each plate of PHI-D medium in a 100×15 mm Petri dish, 10 embryos are transferred, maintaining orientation and the dishes are sealed with parafilm. The plates are incubated in darkness at 28° C. Actively growing putative events, as pale yellow embryonic tissue, are expected to be visible in six to eight weeks. Embryos that produce no events may be brown and necrotic, and little friable tissue growth is evident. Putative transgenic embryonic tissue is subcultured to fresh PHI-D plates at two-three week intervals, depending on growth rate. The events are recorded.

4. Regeneration of T0 plants:

[0193] Embryonic tissue propagated on PHI-D medium is subcultured to PHI-E medium (somatic embryo maturation medium), in 100×25 mm Petri dishes and incubated at 28° C., in darkness, until somatic embryos mature, for about ten to eighteen days. Individual, matured somatic embryos with well-defined scutellum and coleoptile are transferred to PHI-F embryo germination medium and incubated at 28° C. in the light (about 80 μE from cool white or equivalent fluorescent lamps). In seven to ten days, regenerated plants, about 10 cm tall, are potted in horticultural mix and hardened-off using standard horticultural methods.

### Media for Plant Transformation:

[0194] 1. PHI-A: 4 g/L CHU basal salts, 1.0 mL/L 1000× Eriksson's vitamin mix, 0.5 mg/L thiamin HCl, 1.5 mg/L 2,4-D, 0.69 g/L L-proline, 68.5 g/L sucrose, 36 g/L glucose, pH 5.2. Add 100 μM acetosyringone (filter-sterilized).
[0195] 2. PHI-B: PHI-A without glucose, increase 2,4-D to 2 mg/L, reduce sucrose to 30 g/L and supplemented with 0.85 mg/L silver nitrate (filter-sterilized), 3.0 g/L Gelrite®, 100 μM acetosyringone (filter-sterilized), pH 5.8.
[0196] 3. PHI-C: PHI-B without Gelrite® and acetosyringonee, reduce 2,4-D to 1.5 mg/L and supplemented with 8.0 g/L agar, 0.5 g/L 2-[N-morpholino]ethane-sulfonic acid (MES) buffer, 100 mg/L carbenicillin (filter-sterilized).
[0197] 4. PHI-D: PHI-C supplemented with 3 mg/L bialaphos (filter-sterilized).
[0198] 5. PHI-E: 4.3 g/L of Murashige and Skoog (MS) salts, (Gibco, BRL 11117-074), 0.5 mg/L nicotinic acid, 0.1 mg/L thiamine HCl, 0.5 mg/L pyridoxine HCl, 2.0 mg/L glycine, 0.1 g/L myo-inositol, 0.5 mg/L zeatin (Sigma, Cat. No. Z-0164), 1 mg/L indole acetic acid (IAA), 26.4 μg/L abscisic acid (ABA), 60 g/L sucrose, 3 mg/L bialaphos (filter-sterilized), 100 mg/L carbenicillin (filter-sterilized), 8 g/L agar, pH 5.6.
[0199] 6. PHI-F: PHI-E without zeatin, IAA, ABA; reduce sucrose to 40 g/L; replacing agar with 1.5 g/L Gelrite®; pH 5.6.

[0200] Plants can be regenerated from the transgenic callus by first transferring clusters of tissue to N6 medium supplemented with 0.2 mg per liter of 2,4 D. After two weeks the tissue can be transferred to regeneration medium (Fromm et al., Bio/Technology 8:833 839 (1990)).

### Example 5

### Sequences and Vectors for the Silencing of Endogenous Phosphoenolpyruvate Carboxylase (PEPC) and Expression of Shuffled PEPC in Maize

[0201] Artificial miRNAs were designed to silence the C4 form of phosphoenolpyruvate carboxylase (PEPC) in maize (SEQ ID NO:26) and not the C3 (SEQ ID NO:29; NCBI GI No. 429148) nor root forms (SEQ ID NO:30; NCBI GI No. 3132309). One amiRNA referred to herein as PEPC4A was 5′-ucucugcagagccucaucgag-3′ (the DNA sequence corresponding to this amiRNA is represented by SEQ ID NO:1), and another, referred to herein as PEPC4B, was 5′-uucagaaacuccagaagccag-3′ (the DNA sequence corresponding to this amiRNA is represented by SEQ ID NO:2). The DNA sequences corresponding to the artificial star sequences that were used to silence phosphoenolpyruvate carboxylase are shown in Table 1.

TABLE 1
Artificial microRNA Star
Sequences for Silencing of PEPC

| | | SEQ |
|---|---|---|
| In amiRNA | Artificial Star | ID |
| precursor | Sequence | NO |
| (396h-PEPC4A) | ctcgatgaagctctgcagaga | 3 |
| (396h-PEPC4B) | ctggcttccggagtttctgaa | 4 |
| (169r-PEPC4A) | ttcgatgaggtctctgcagagc | 5 |

[0202] Genomic miRNA precursor genes were converted to amiRNA precursors using overlapping PCR (Example 3), and the resulting DNAs were completely sequenced. The following amiRNAs precursors were made:

TABLE 2
Artificial microRNA Precursor Sequences for Silencing of PEPC

| amiRNA | SEQ | Length |
|---|---|---|
| Precursor | ID NO | (nucs) |
| 396h-PEPC4A | 6 | 645 |
| 396h-PEPC4B | 7 | 645 |
| 169r-PEPC4A | 8 | 872 |

[0203] amiRNAs were then cloned using standard methods to produce vectors (Table 3) that contain the shuffled version of PEPC and the amiRNA targeted to the endogenous PEPC.

TABLE 3
Vectors for Silencing of Endogenous
PEPC and Expression of Shuffled PEPC

| | | Resulting | SEQ | |
|---|---|---|---|---|
| amiRNA | Shuffled PEPC | plasmid | ID NO | FIG |
| 396h-PEPC4A | ZmPEPC MOD2 | PHP38464 | 9 | 5 |
| | SEQ ID NO: 27 | | | |
| 396h-PEPC4A | ZmPEPC MOD1 | PHP38463 | 10 | 6 |
| | SEQ ID NO: 31 | | | |
| 396h-PEPC4B | ZmPEPC MOD3 | PHP38465 | 11 | 7 |
| | SEQ ID NO: 28 | | | |
| 169r-PEPC4A | ZmPEPC MOD3 | PHP38462 | 12 | 8 |
| | SEQ ID NO: 28 | | | |

### Example 6

### Sequences and Vectors for the Silencing of Endogenous Rubisco Activase 1 (RCA1) and Expression of Shuffled RCA in Maize

[0204] The artificial miRNA that was used to silence rubisco activase 1 in maize (ZmRCA1; SEQ ID NO:22; Genbank ID No. AF084478.3) was 5′-ucugcuucgucucguccaccu-3′ and is herein referred to as RCA1a (the DNA sequence corresponding to this amiRNA is represented by SEQ ID NO:13). The DNA sequences corresponding to the artificial star sequences that were used to silence rubisco activase are shown in Table 4.

TABLE 4
Artificial microRNA Star
Sequences for Silencing of RCA

| | | SEQ |
|---|---|---|
| In amiRNA | | ID |
| precursor | Star Sequence | NO |
| 396h-RCA1a | aggtggactagacgaagcaga | 14 |
| 169r-RCA1a | gggtggacgaagacgaagcagc | 15 |

[0205] Genomic miRNA precursor genes were converted to amiRNA precursors using overlapping PCR (Example 3), and the resulting DNAs were completely sequenced. The following amiRNAs precursors are made:

TABLE 5
Artificial microRNA Precursor Sequences
for the Silencing of RCA

| microRNA | SEQ | Length |
|---|---|---|
| Precursor | ID NO | (nucs) |
| 396h-RCA1a | 16 | 645 |
| 169r-RCA1a | 17 | 872 |

[0206] amiRNAs were then cloned using standard methods to produce vectors (Table 6) that contain the shuffled version of RCA and the amiRNA targeted to the endogenous RCA.

TABLE 6
Vectors for Silencing of Endogenous
RCA and Expression of Shuffled RCA

| | | Resulting | SEQ | |
|---|---|---|---|---|
| amiRNA | Shuffled RCA 1 | plasmid | ID NO | FIG |
| 396h-RCA1a | ZmRCA1 MOD3 | PHP39309 | 18 | 1 |
| | SEQ ID NO: 25 | | | |
| 396h-RCA1a | ZmRCA1 MOD1 | PHP39307 | 19 | 2 |
| | SEQ ID NO: 23 | | | |
| 396h-RCA1a | ZmRCA1 MOD2 | PHP39308 | 20 | 3 |
| | (VARIANT 1) | | | |
| | SEQ ID NO: 24 | | | |
| 169r-RCA1a | ZmRCA1 MOD2 | PHP40973 | 21 | 4 |
| | (VARIANT 1) | | | |
| | SEQ ID NO: 24 | | | |

### Example 7

### Quantification of RNA Expression Using qRT-PCR

[0207] Samples submitted for analysis are stored at −80 C until RNA isolation. RNA is isolated using the EZNA RNA kit (Omega Bio-Tek, Norcross, Calif., catalog #R1034-092) following manufacturer's conditions. The RNA is eluted in 60 of RNAse-free water and treated with 20 units of DNAse (Roche, Indianapolis, Ind.) following manufacturer's conditions. The DNAsed RNA is diluted with 4 volumes of 500 mM EDTA, pH 8 prior to inactivation of the DNAse by incubation at 65 C for 30 minutes. The absence of DNA in the final RNA prep had been determined in a previous experiment for the same type and amount of tissue, using QRTPCR reactions (see below) containing Taq polymerase enzyme only (no reverse transcriptase enzyme). The purity and absence of inhibition by the RNA in QRTPCR reactions had been determined in a previous experiment for the same type and amount of tissue, using the Agilent BioAnalyzer (purity) and QRTPCR analysis of serially diluted RNA, which showed the expected dose-response (absence of inhibition). A normalization control assay is used to account for well to well RNA concentration differences and is designed to the sequence of the corn RNA polymerase II large subunit transcript. The normalization control transcript is found to have a constant relationship to the concentration of RNA in similar samples, in a separate experiment. Real time QRTPCR assays are designed using Primer Express 3.0 (Applied Biosystems, Foster, Calif.). All Taqman™ probes are quenched with the minor groove binder (MGB). Primers were obtained from Integrated DNA Technologies (Coralville, Iowa) and MGB probes were obtained from Applied Biosystems.

[0208] For a comparative analysis of the RCA native transcript and the transcript produced from the shuffled RCA, an “allele discrimination” expression assay was developed. There are several sequence polymorphisms distinguishing the native RCA transcript from the introduced transgene, and a Taqman assay was designed to exploit these polymorphisms to confer the necessary specificity to the detection of each transcript. The RCA “allele discrimination” assay included a primer pair, which amplified both transcripts equally, and two probes: one probe (FAM-labeled) that only detects transgenic RCA and another probe (VIC-labeled) that only detects native RCA. The specificity of the assay was confirmed by testing non-transgenic samples, which showed only signal from the Vic-native RCA probe and no signal from the Fam-transgenic probe. In the RCA transcript analysis, the normalization control and RCA assays were run in separate reactions, and duplicates were analyzed.

[0209] For a comparative analysis of the PEPC native transcript and the transcript produced from the shuffled PEPC, two assays were designed, one to detect the native PEPC transcript and the other to detect the transcript produced from the shuffled PEPC. To detect the native PEPC, an assay was designed in the part of the native sequence not present in the transgenic construct. For analysis of the shuffled PEPC transcript, an assay to the 5 prime end of the UBQ3 terminator region was used. The PEPC and UBQ3 probes were both labeled with FAM. For the PEPC assays, the PEPC and normalization control assays were duplexed in the same reactions, and one replicate was analyzed.

[0210] The one step QRTPCR is performed according to manufacturer's suggestions using the SuperScriptlll Platinum One Step QRTPCR kit (Invitrogen, Carlsbad, Calif., catalog #11745-500). Ten microliter one-step QRTPCR reactions can contain 5 microliters of 2× master mix, 0.2 μl of 50×SSIII/Platinum Taq/RNAse OUT mixture, 8 picomoles of each primer and 0.8 picomoles of each probe, 4 microliters of RNA and RNAse-free water to volume. The Applied Biosytems 7900 instrument is used for real time thermal cycling, with conditions of: 3 minutes at 50 C (reverse transcription step), initial enzyme activation of 5 minutes at 95 C, and 40 cycles of 15 seconds at 95 C and 1 minute at 60 C (when fluorescence data is collected). Sequence Detection System version 2.2.1 is used for data collection and analysis. Calibrator samples are employed in all experiments in order to allow comparisons across experiments.

[0211] The calibrator RNA sample for each assay (RCA or PEPC) was a pool of samples obtained from transgenic plants that contain both native and shuffled transcripts. A non-transgenic maize RNA sample was tested in all assays (B73).

[0212] The cycle threshold (Ct) data was exported from SDS software to Microsoft Excel. The delta delta Ct method was validated and employed for relative expression calculations (User Bulletin#2, Applied Biosystems). The relative expression of each gene of interest can be described as “fold expression of the gene of interest, relative to its expression in the calibrator, normalized to the expression of the corn RNA polymerase II LSU gene”.

### Example 8

### Quantification of Protein Expression Using MS

### Sample Preparation

[0213] A total of 500 μL of T-CCLR buffer (100 mM KP pH 7.8, 1 mM EDTA, 7 mM BME, 1% Triton, 10% Glycerol and 1× Protease Inhibitor (CalBiochem Cat#539137, Protease Inhibitor Cocktail Set V. EDTA-Free)) is added per 10 leaf discs. Samples are mixed in a Spex Certiprep 2000 GenoGrinder at a setting of 1600 strokes/min for 1 min, centrifuged briefly. Grinding is repeated once and samples are then centrifuged (4° C., 3900 g) for 10 min. The supernatant is kept on ice, and total soluble proteins (TSPs) are measured with a Coomassie Protein Assay Reagent Kit (Pierce #23200). A total of 50 μL of supernatant is added to 110 μL of digestion buffer (50 mM ammonium bicarbonate (ABC); no adjustment of pH) in polymerase chain reaction (PCR) tubes. An appropriate amount of recombinant protein is spiked to blank matrix and used as standard curve. An appropriate amount of sequencing grade modified trypsin (Promega) is added (trypsin/TSP ratio ˜1:15) to all samples including standard curve. Samples are mixed briefly and spun in a microcentrifuge. Samples are then placed in a homemade sample holder fitted into a CEM Discover Proteomics System (Matthews, NC). Digestion is allowed to occur for 30 min (45° C., 50 W). After acidification with 10 μL of 10% (v/v) formic acid, samples are subject to LC-MS/MS analysis.

### LC-MS/MS

[0214] The LC-MS/MS system includes an AB Sciex 4000 Q-TRAP with a Turbo ion-spray source and Agilent 1100 LC. The autosampler temperature is kept at 6° C. during analysis. A total of 40 μL is injected onto an Aquasil, 100×2.1 mm, 3 μm, C18 column (ThermoFisher). LC is performed at a flow rate of 0.6 mL/min. Mobile phases consist of 0.1% formic acid (MPA) and 0.1% formic acid in acetonitrile (MPB). The total run time for each injection is ˜28 min. Below is the detailed gradient table:

| | Total | Flow | A | B |
|---|---|---|---|---|
| Step | Time(min) | Rate(μl/min) | (%) | (%) |
| 0 | 0.1 | 333 | 98 | 2 |
| 1 | 1 | 333 | 98 | 2 |
| 2 | 1.1 | 250 | 98 | 2 |
| 3 | 1.2 | 50 | 50 | 50 |
| 4 | 20 | 50 | 50 | 50 |
| 5 | 21 | 666 | 10 | 90 |
| 6 | 24.5 | 666 | 10 | 90 |
| 7 | 25.5 | 333 | 98 | 2 |
| 8 | 28 | 333 | 98 | 2 |

[0215] The mass spectrometer is operated in both multiple reaction monitoring (MRM) and linear ion-trap mode to select signature peptides. A complete list of MRM transitions is generated using MRM-initiated detection and sequencing (MIDAS) (AB Sciex) software for all tryptic peptides with an appropriate length (6-30 amino acids). The digested recombinant protein is analyzed using MRM-triggered information-dependent acquisition (IDA) to obtain both MRM chromatograms and MS/MS spectra, with the latter facilitating selection of the product ions with the highest sensitivity. The mass spectrometer is run in MRM mode at unit-mass resolution in both Q1 and Q3. The following electrospray ionization source parameters are used: dwell time, 200 ms for all MRM transitions; ion-spray voltage, 5500 V; ion source temperature, 555° C.; curtain gas (CUR), 20; both ion source gas 1 (GS1) and ion source gas 2 (GS2), 80; collision gas (CAD), high.

[0216] Chromatograms are integrated using AB Sciex software Analyst 1.4.2 with a Classic algorithm. Analyte peak areas are plotted against protein concentrations. A linear regression with 1/x2 (where x=concentration) weighting is used for calibration curve fitting.

[0217] The monitored MRM transitions were:

RCA WT (SEQ ID NO:35): 680.8/859.6, WVSETGVENIAR (doubly charged) and 388.2/575.3, EASDLIK (doubly charged)
RCA1 MOD1 (SEQ ID NO:32): 672.8/859.6, WVAETGVENIAR (doubly charged) RCA1 MOD2 (Variant 1) (SEQ ID NO:33): 380.2/559.6, EAADLIK (doubly charged) and 532.3/671.5, NFMSLPNIK (doubly charged)
RCA1 MOD3 (SEQ ID NO:34): 532.3/671.5, NFMSLPNIK (doubly charged)
PEPC WT (SEQ ID NO:39): 587.3/617.4, QEWLLSELR (doubly charged)
PEPC MOD1 (SEQ ID NO:36): 581.8/934.5, DILEGDPYLK (doubly charged) and 573.3/589.4, QEWLLSELK (doubly charged)
PEPC MOD2 (SEQ ID NO:37): 696.9/738.4, 696.9/851.5, VTLDLLEMIFAK (doubly charged)
PEPC MOD3 (SEQ ID NO:38): 540.3/879.5, LSAAWQLYK (doubly charged) and 573.3/589.4, QEWLLSELK (doubly charged)

### Example 9

### Analysis of Plants Expressing Shuffled PEPCase

[0218] Maize embryos from cultivar PH17AW were transformed by Agrobacterium containing plasmids PHP38464, PHP38463, PHP38465, or PHP38462 according to the protocol set out in Example 4. Transformants were screened. Plants containing only a single copy of the transgene were grown in the greenhouse, and leaf samples were collected for analysis. Controls were non-transgenic wild type PH17AW plants grown from seed and collected at a similar developmental stage. One skilled in the art would know that there are many methods of examining expression including RNA blot analysis, quantitative reverse-transcriptase polymerase chain reaction (qRT-PCR), Western blot analysis, ELISA, and MS protein determination. Expression was examined herein using both qRT-PCR (Example 7) and MS protein determination (Example 8); the results are shown in Tables 7-10.

TABLE 7
PHP38462 Results

| | |
|---|---|
| MS - Protein (ppm) | qRTPCR - mRNA |

| | shuffled | WT | shuffled | WT |
|---|---|---|---|---|
| Event ID | PEPC | PEPC | PEPC | PEPC |
| 119797417 | 10,254 | 1,668 | 44.71 | 4.22 |
| 119797418 | 4,532 | 351 | 59.71 | 2.16 |
| 119797419 | 8,095 | 1,563 | 31.40 | 1.93 |
| 119797420 | 1,094 | 32,003 | 0.04 | 53.01 |
| 119797421 | 3,106 | 23,998 | 0.03 | 47.72 |
| 119797422 | 8,150 | 1,402 | 30.54 | 2.93 |
| 119797423 | 4,619 | 663 | 49.42 | 5.47 |
| 119797424 | 17,268 | 1,433 | 28.15 | 1.07 |
| 119797425 | 21,785 | 12,402 | low RNA | 7.43 |
| 119797426 | 6,754 | 1,351 | 25.14 | 1.58 |
| 119797427 | 4,637 | 15,757 | 62.51 | 60.96 |
| 119797428 | 13,746 | 50,328 | 33.66 | 44.36 |
| 119797429 | 14,554 | 3,792 | 27.69 | 2.36 |
| 119797430 | 6,902 | 585 | 27.25 | 3.20 |
| 119797431 | 23,336 | 3,507 | 47.41 | 2.48 |
| 119797432 | 9,977 | 5,154 | 0.11 | 42.60 |
| 119797433 | 25,615 | 4,195 | 62.32 | 4.28 |
| 119797434 | 8,550 | 1,605 | 31.50 | 1.51 |
| 119797435 | 52,462 | 6,170 | 38.11 | 2.97 |
| 119797436 | 9,333 | 10,933 | 29.98 | 2.92 |
| 119797437 | 1,324 | 34,623 | 0.03 | 34.91 |
| 119797438 | 17,259 | 2,543 | 35.76 | 2.01 |
| 119797440 | 6,798 | 1,078 | 22.51 | 1.69 |
| 119797441 | 12,727 | 2,982 | 34.48 | 4.31 |
| 119797442 | 23,529 | 4,448 | 36.96 | 2.88 |
| 119797443 | 10,150 | 2,559 | 14.42 | 2.42 |
| 119797444 | 587 | 35,264 | 0.04 | 33.17 |
| 119797445 | 13,332 | 2,317 | 18.11 | 0.90 |
| 100845286 | | | 0.00 | 43.67 |
| (control) | | | | |
| 106867160 | | | 0.00 | 63.49 |
| (control) | | | | |

TABLE 8
PHP38463 Results

| | |
|---|---|
| MS - Protein (ppm) | qRTPCR - mRNA |

| | shuffled | WT | shuffled | WT |
|---|---|---|---|---|
| Event ID | PEPC | PEPC | PEPC | PEPC |
| 119798029 | 27,510 | 1,890 | 12.69 | 1.92 |
| 119798030 | 23,419 | 2,488 | 18.24 | 1.28 |
| 119798031 | 20,227 | 3,075 | 17.62 | 1.79 |
| 119798032 | 22,828 | 83,452 | 51.82 | 55.55 |
| 119798033 | 36,170 | 2,805 | 17.28 | 1.08 |
| 119798034 | 13,826 | 1,157 | 2.38 | 1.65 |
| 119798035 | 28,290 | 2,331 | 9.47 | 1.85 |
| 119798036 | 42,977 | 2,955 | 15.76 | 2.31 |
| 119798037 | 34,297 | 3,039 | 16.73 | 1.90 |
| 119798038 | 319 | 133,008 | 0.01 | 33.52 |
| 119798039 | 155 | 92,636 | 0.01 | 48.03 |
| 119798040 | 135 | 135,853 | 0.01 | 30.31 |
| 119798041 | 19,636 | 2,126 | 5.64 | 1.73 |
| 119798042 | 31,682 | 2,640 | 15.32 | 1.82 |
| 119798043 | 226 | 115,269 | 0.03 | 46.54 |
| 119798044 | 218 | 138,264 | 0.00 | 33.75 |
| 119798045 | 76 | 125,198 | 0.01 | 35.57 |
| 119798046 | 12,390 | 1,934 | 2.16 | 1.40 |
| 119798048 | 36,583 | 3,634 | 19.80 | 1.77 |
| 119798050 | 17,939 | 1,107 | 2.34 | 1.11 |
| 119798052 | 112 | 138,101 | 0.01 | 39.61 |
| 119798053 | 32,201 | 2,644 | 15.71 | 1.96 |
| 119798054 | 632 | 4,080 | 0.06 | 1.28 |
| 119798055 | 26,011 | 2,101 | 23.96 | 2.63 |
| 119798056 | 35,620 | 2,824 | 15.99 | 1.54 |
| 119798057 | 35,570 | 3,374 | 0.07 | 39.69 |
| 100845286 | | | 0.00 | 43.67 |
| (control) | | | | |
| 106867160 | | | 0.00 | 63.49 |
| (control) | | | | |

TABLE 9
PHP38464 Results

| | |
|---|---|
| MS - Protein (ppm) | qRTPCR - mRNA |

| | shuffled | WT | shuffled | WT |
|---|---|---|---|---|
| Event ID | PEPC | PEPC | PEPC | PEPC |
| 119267265 | 31,949 | 4,987 | 43.81 | 1.35 |
| 119267266 | 5,476 | 2,743 | 23.02 | 1.56 |
| 119267267 | 11,993 | 1,377 | 15.95 | 1.52 |
| 119267268 | 12,182 | 5,474 | 14.82 | 1.37 |
| 119267270 | 10,083 | 5,948 | 18.56 | 1.18 |
| 119267271 | 10,264 | 4,140 | 2.62 | 0.96 |
| 119267272 | 23,739 | 1,648 | 65.60 | 1.54 |
| 119267273 | 32,186 | 1,005 | 111.14 | 1.31 |
| 119267274 | 15,683 | 786 | 35.62 | 0.99 |
| 119267275 | 4,422 | 1,537 | 6.99 | 0.04 |
| 119267276 | 114 | 117,661 | 0.02 | 41.12 |
| 119267277 | 41,468 | 393 | 356.50 | 2.06 |
| 119267278 | 29,272 | 513 | 97.80 | 1.20 |
| 119267279 | 15,768 | 495 | 89.61 | 1.36 |
| 119267280 | 25,557 | 2,319 | 63.17 | 1.47 |
| 119267281 | 6,319 | 2,783 | 35.47 | 2.01 |
| 119267282 | 30,773 | 382 | 135.05 | 1.87 |
| 119267283 | 9,543 | 2,920 | 16.73 | 2.04 |
| 119267284 | 9,307 | 3,234 | 16.67 | 1.62 |
| 119267285 | 15,216 | 1,183 | 34.13 | 1.19 |
| 119267286 | 19,515 | 940 | 59.59 | 1.55 |
| 106867080 | | | 0.02 | 38.66 |
| (control) | | | | |
| 106867040 | | | 0.05 | 36.49 |
| (control) | | | | |

TABLE 10
PHP38465 Results

| | |
|---|---|
| MS - Protein (ppm) | qRTPCR - mRNA |

| | shuffled | WT | shuffled | WT |
|---|---|---|---|---|
| Event ID | PEPC | PEPC | PEPC | PEPC |
| 119953227 | 7,104 | 34,062 | 0.07 | 1.21 |
| 119953228 | 30,339 | 2,628 | 11.20 | 0.57 |
| 119953229 | 68,105 | 16,012 | 87.80 | 1.42 |
| 119953231 | 28,439 | 10,741 | 9.61 | 0.90 |
| 119953233 | 65,102 | 23,277 | 10.55 | 1.52 |
| 119953235 | 30,407 | 95,025 | 21.69 | 23.37 |
| 119953236 | 29,227 | 4,527 | 9.36 | 1.51 |
| 119953239 | 34,173 | 3,579 | 19.70 | 1.94 |
| 119953240 | 40,880 | 3,250 | 30.12 | 1.29 |
| 119953241 | 42,368 | 2,122 | 22.87 | 0.49 |
| 119953243 | 1,034 | 153,782 | 0.01 | 37.39 |
| 119953244 | 29,368 | 96,405 | 24.83 | 35.17 |
| 119953248 | 26,235 | 6,280 | 2.18 | 0.74 |
| 119953249 | 41,250 | 8,719 | 14.32 | 0.77 |
| 119953250 | 919 | 187,849 | not in use | 34.21 |
| 119953251 | 39,292 | 50,204 | 8.10 | 1.13 |
| 119953252 | 29,881 | 12,320 | 7.10 | 1.16 |
| 119953253 | 34,794 | 12,290 | 8.13 | 0.79 |
| 119953254 | 3,557 | 93,827 | 0.05 | 35.65 |
| 119953255 | 62,188 | 39,002 | 29.05 | 1.96 |
| 119953256 | 26,072 | 32,058 | 4.05 | 0.75 |
| 106867080 | | | 0.02 | 38.66 |
| (control) | | | | |
| 106867040 | | | 0.05 | 36.49 |
| (control) | | | | |

[0219] Tables 7-10 present quantitative RT-PCR and mass spectrometry protein results showing that miRNA can reduce the level of expression of the of the endogenous PEPC gene while allowing the shuffled variant of PEPC to be expressed. For example, event 119797417 in Table 7 shows that the amount of shuffled PEPC protein is on the order of 10,254 ppm, while the amount of endogenous (WT) PEPC protein is 1,668 ppm. Moreover, the amount of shuffled PEPC mRNA is over 10-fold greater than the amount of endogenous (WT) PEPC mRNA, as assessed using qRT-PCR. Multiple events showed similar results, thereby proving that constructs of the disclosure can be used to silence an endogenous gene while expressing a similar gene.

### Example 10

### Analysis of Plants Expressing Shuffled RCA1

[0220] Maize embryos from cultivar PH17AW were transformed by Agrobacterium containing plasmids PHP39309, PHP39307, PHP39308, or PHP40973 according to the protocol set out in Example 4. Transformants were screened. Plants containing only a single copy of the transgene were grown in the greenhouse, and leaf samples were collected for analysis. Controls were non-transgenic wild type PH17AW plants grown from seed and collected at a similar developmental stage. One skilled in the art would know that there are many methods of examining expression including RNA blot analysis, quantitative reverse-transcriptase polymerase chain reaction (qRT-PCR), Western blot analysis, ELISA, and MS protein determination. Expression was examined herein using both qRT-PCR (Example 7) and MS protein determination (Example 8); the results are shown in Tables 11-14.

TABLE 11
PHP39307 Results

| | |
|---|---|
| MS - protein (ppm) | qRTPCR - mRNA |

| | shuffled | WT | shuffled | Wild type |
|---|---|---|---|---|
| Event ID | RCA | RCA | mean | mean |
| 120823656 | 0 | 1988 | 0.00 | 3.75 |
| 120823653 | 4515 | 71 | 3.20 | 0.08 |
| 120823659 | 7675 | 169 | 7.71 | 0.12 |
| 120823651 | 4253 | 154 | 3.31 | 0.10 |
| 120823649 | 4205 | 175 | 3.63 | 0.16 |
| 120823650 | 10548 | 342 | 9.04 | 0.08 |
| 120823660 | 11309 | 360 | 8.55 | 0.20 |
| 120823638 | 5261 | 255 | 5.74 | 0.36 |
| 120823647 | 0 | 2043 | 0.00 | 6.40 |
| 120823654 | 5056 | 587 | 4.46 | 0.45 |
| 120823648 | 4863 | 136 | 5.83 | 0.15 |
| 120823655 | 3508 | 122 | 2.69 | 0.05 |
| 120823646 | 4241 | 93 | 2.75 | 0.15 |
| 120823657 | 15637 | 430 | 12.81 | 0.04 |
| 120823641 | 5814 | 822 | 6.19 | 1.25 |
| 120823645 | 3190 | 838 | 3.94 | 0.16 |
| 120823642 | 2661 | 67 | 4.37 | 0.03 |
| 120823643 | 4925 | 278 | 6.60 | 0.53 |
| 119276294 | | | 0.00 | 4.90 |
| (control) | | | | |
| 119276454 | | | 0.00 | 4.06 |
| (control) | | | | |

TABLE 12
PHP39308 Results

| | |
|---|---|
| MS - protein (ppm) | qRTPCR - mRNA |

| | shuffled | WT | shuffled | Wild type |
|---|---|---|---|---|
| Event ID | RCA | RCA | mean | mean |
| 120823787 | 3439 | 3 | 4.45 | 0.11 |
| 120823785 | 116 | 2802 | 0.01 | 9.89 |
| 120823789 | 12182 | 339 | 8.86 | 0.22 |
| 120823786 | 128 | 2009 | 0.01 | 4.44 |
| 120823784 | 3875 | 0 | 5.51 | 0.04 |
| 120823788 | 6869 | 42 | 10.89 | 0.02 |
| 120823805 | 2402 | 22 | 4.26 | 0.06 |
| 120823809 | 6705 | 330 | 7.45 | 0.47 |
| 120823806 | 5850 | 410 | 7.90 | 0.36 |
| 120823804 | 5021 | 70 | 5.40 | 0.01 |
| 120823811 | 34 | 2604 | 0.01 | 8.55 |
| 120823796 | 3467 | 33 | 3.59 | 0.04 |
| 120823807 | 13372 | 241 | 13.11 | 0.14 |
| 120823803 | 11751 | 53 | 11.51 | 0.11 |
| 120823795 | 4490 | 157 | 3.95 | 0.18 |
| 120823810 | 4658 | 49 | 4.32 | 0.06 |
| 120823802 | 5298 | 131 | 4.42 | 0.02 |
| 120823798 | 6194 | 448 | 5.32 | 0.14 |
| 120823799 | 3305 | 68 | 1.98 | 0.11 |
| 120823794 | 4115 | 26 | 4.46 | 0.09 |
| 120823790 | 3622 | 34 | 4.23 | 0.02 |
| 120823801 | 4240 | 0 | 4.34 | 0.01 |
| 120823793 | 3098 | 105 | 3.82 | 0.05 |
| 120823797 | 3584 | 15 | 4.83 | 0.01 |
| 120823800 | 5478 | 175 | 7.46 | 0.03 |
| 120823791 | 8011 | 51 | 9.13 | 0.03 |
| 120823792 | 54 | 1764 | 0.01 | 5.31 |
| 119276294 | | | 0.00 | 4.90 |
| (control) | | | | |
| 119276454 | | | 0.00 | 4.06 |
| (control) | | | | |

TABLE 13
PHP39309 Results

| | |
|---|---|
| MS - protein (ppm) | qRTPCR - mRNA |

| | shuffled | WT | shuffled | Wild type |
|---|---|---|---|---|
| Event ID | RCA | RCA | mean | mean |
| 120587523 | 5470 | 319 | 3.81 | 0.03 |
| 120587527 | 14571 | 940 | 5.50 | 0.13 |
| 120587514 | 3446 | 254 | 5.01 | 0.04 |
| 120587526 | 5310 | 386 | 10.54 | 0.05 |
| 120587505 | 7166 | 457 | 6.96 | 0.08 |
| 120587525 | 7408 | 470 | 5.56 | 0.03 |
| 120587509 | 4567 | 315 | 9.90 | 0.04 |
| 120587529 | 11699 | 237 | 10.39 | 0.02 |
| 120587516 | 2480 | 208 | 2.76 | 0.06 |
| 120587528 | 5327 | 703 | 4.48 | 0.11 |
| 120587524 | 8561 | 414 | 7.92 | 0.03 |
| 120587530 | 6300 | 428 | 0.51 | 0.00 |
| 120587504 | 5376 | 572 | 2.39 | 0.09 |
| 120587510 | 4345 | 300 | 5.52 | 0.05 |
| 120587507 | 14680 | 342 | 11.15 | 0.09 |
| 120587513 | 13986 | 272 | 15.46 | 0.05 |
| 120587519 | 3926 | 195 | 6.44 | 0.03 |
| 120587508 | 4881 | 306 | 5.94 | 0.06 |
| 120587520 | 14260 | 481 | 7.02 | 0.07 |
| 120587522 | 6185 | 259 | 6.65 | 0.04 |
| 120587515 | 3750 | 124 | 8.64 | 0.02 |
| 120587521 | 2905 | 179 | 4.24 | 0.08 |
| 120587518 | 14027 | 954 | 3.05 | 0.04 |
| 120587517 | 13061 | 501 | 5.14 | 0.02 |
| 119276328 | | | 0.00 | 4.08 |
| (control) | | | | |
| 119276329 | | | 0.00 | 5.15 |
| (control) | | | | |

TABLE 14
PHP40973 Results

| | |
|---|---|
| MS - protein (ppm) | qRTPCR - mRNA |

| | shuffled | WT | shuffled | Wild type |
|---|---|---|---|---|
| Event ID | RCA | RCA | mean | mean |
| 121566508 | 1790 | 4485 | 3.74 | 2.64 |
| 121566507 | 6608 | 4996 | 3.29 | 2.67 |
| 121566510 | 5045 | 5074 | 3.16 | 4.13 |
| 121566509 | 3504 | 5098 | 4.39 | 4.99 |
| 121566512 | 3930 | 3519 | 3.48 | 2.80 |
| 121566503 | 4423 | 4760 | 4.19 | 4.51 |
| 121566513 | 96 | 3637 | 0.00 | 4.19 |
| 121566514 | 4374 | 5028 | 2.63 | 3.76 |
| 121566494 | 1574 | 5562 | 3.61 | 5.91 |
| 121566495 | 4771 | 4276 | 4.02 | 4.48 |
| 121566498 | 6699 | 5534 | 9.39 | 5.62 |
| 121566504 | 2652 | 4225 | 5.64 | 5.72 |
| 121566499 | 6478 | 4362 | 4.29 | 4.01 |
| 121566501 | 2645 | 4984 | 1.30 | 3.76 |
| 121566506 | 11672 | 3853 | 5.15 | 1.98 |
| 121566497 | 4794 | 4993 | 2.52 | 4.61 |
| 121566502 | 5530 | 4204 | 4.12 | 3.20 |
| 121566505 | 0 | 3869 | 0.01 | 3.30 |
| 119276313 | | | 0 | 2.58 |
| (control) | | | | |
| 121657374 | | | 0 | 3.45 |
| (control) | | | | |

[0221] Tables 11-14 present quantitative RT-PCR and mass spectrometry protein results showing that miRNA can reduce the level of expression of the endogenous RUBISCO Activase 1 gene while allowing expression of a shuffled variant of RUBISCO Activase 1. For example, event 120823653 in Table 11 shows that the amount of shuffled RCA protein is on the order of 4,515 ppm, while the amount of endogenous (WT) RCA protein is 71 ppm. Moreover, the amount of shuffled RCA mRNA is 40-fold greater than the amount of endogenous (WT) PEPC mRNA, as assessed using qRT-PCR. Multiple events showed similar results, thereby proving that constructs of the disclosure can be used to silence an endogenous gene while expressing a similar gene.

### Example 11

### Silencing of Endogenous Gene and Expression of Shuffled Version in Soybean

[0222] Artificial miRNAs and artificial star sequences can be designed (as described in Examples 1 and 2, respectively) to silence a gene of interest in soybean. Genomic miRNA precursor genes can then be converted to amiRNA precursors using overlapping PCR (Example 3), and the resulting DNAs can be completely sequenced. Artificial miRNAs can then be cloned using standard methods to produce vectors that contain the shuffled version of a gene of interest and the amiRNA targeted to the endogenous gene. Transformation can occur, for example, as described in Example 12, and qRT-PCR and MS analyses can be performed, for example, as described in Examples 7 and 8.

### Example 12

### Transformation of Soybean

### Culture Conditions:

[0223] Soybean embryogenic suspension cultures (cv. Jack) are maintained in 35 mL liquid medium SB196 (infra) on a rotary shaker, 150 rpm, 26° C. with cool white fluorescent lights on 16:8 hr day/night photoperiod at light intensity of 60-85 μE/m²/s. Cultures are subcultured every 7 days to 2 weeks by inoculating approximately 35 mg of tissue into 35 mL of fresh liquid SB196 (the preferred subculture interval is every 7 days).

[0224] Soybean embryogenic suspension cultures are transformed with soybean expression plasmids by the method of particle gun bombardment (Klein et al., Nature, 327:70 (1987)) using a DuPont Biolistic PDS1000/HE instrument (helium retrofit) for all transformations.

### Soybean Embryogenic Suspension Culture Initiation:

[0225] Soybean cultures are initiated twice each month with 5-7 days between each initiation. Pods with immature seeds from available soybean plants 45-55 days after planting are picked, removed from their shells and placed into a sterilized magenta box. The soybean seeds are sterilized by shaking them for 15 min in a 5% Clorox solution with 1 drop of ivory soap (i.e., 95 mL of autoclaved distilled water plus 5 mL Clorox and 1 drop of soap, mixed well). Seeds are rinsed using 2 1-liter bottles of sterile distilled water and those less than 4 mm are placed on individual microscope slides. The small end of the seed is cut and the cotyledons pressed out of the seed coat. Cotyledons are transferred to plates containing SB1 medium (25-30 cotyledons per plate). Plates are wrapped with fiber tape and stored for 8 weeks. After this time secondary embryos are cut and placed into SB 196 liquid media for 7 days.

### Preparation of DNA for Bombardment:

[0226] Either an intact plasmid or a DNA plasmid fragment containing the genes of interest and the selectable marker gene are used for bombardment. Fragments from soybean expression plasmids are obtained by gel isolation of digested plasmids. The resulting DNA fragments are separated by gel electrophoresis on 1% SeaPlaque GTG agarose (BioWhitaker Molecular Applications) and the DNA fragments containing gene cassettes are cut from the agarose gel. DNA is purified from the agarose using the GELase digesting enzyme following the manufacturer's protocol.

[0227] A 50 μL, aliquot of sterile distilled water containing 3 mg of gold particles is added to 5 μL, of a 1 μg/μL DNA solution (either intact plasmid or DNA fragment prepared as described above), 50 μL, 2.5 M CaCl₂ and 20 μL, of 0.1 M spermidine. The mixture is shaken 3 min on level 3 of a vortex shaker and spun for 10 sec in a bench microfuge. After a wash with 400 μL, of 100% ethanol, the pellet is suspended by sonication in 40 μL, of 100% ethanol. DNA suspension (5 mL) is dispensed to each flying disk of the Biolistic PDS1000/HE instrument disk. Each 5 μL, aliquot contains approximately 0.375 mg gold particles per bombardment (i.e., per disk).

Tissue Preparation and Bombardment with DNA:

[0228] Approximately 150-200 mg of 7 day old embryonic suspension cultures is placed in an empty, sterile 60×15 mm petri dish and the dish is covered with plastic mesh. Tissue is bombarded 1 or 2 shots per plate with membrane rupture pressure set at 1100 PSI and the chamber is evacuated to a vacuum of 27-28 inches of mercury. Tissue is placed approximately 3.5 inches from the retaining/stopping screen.

### Selection of Transformed Embryos:

[0229] Transformed embryos are selected using hygromycin as the selectable marker. Specifically, following bombardment, the tissue is placed into fresh SB196 media and cultured as described above. Six days post-bombardment, the SB196 is exchanged with fresh SB196 containing 30 mg/L hygromycin. The selection media is refreshed weekly. Four to six weeks post-selection, green, transformed tissue is observed growing from untransformed, necrotic embryogenic clusters. Isolated, green tissue is removed and inoculated into multiwell plates to generate new, clonally propagated, transformed embryogenic suspension cultures.

### Embryo Maturation:

[0230] Embryos are cultured for 4-6 weeks at 26° C. in SB196 under cool white fluorescent (Phillips cool white Econowatt F40/CW/RS/EW) and Agro (Phillips F40 Agro) bulbs (40 watt) on a 16:8 hr photoperiod with light intensity of 90-120 E/m²s. After this time embryo clusters are removed to a solid agar media, SB166, for 1-2 weeks. Clusters are then subcultured to medium SB103 for 3 weeks.

### Media Recipes:

### SB196

### FN Lite Liquid Proliferation Medium (Per Liter)

| | | |
|---|---|---|
| MS FeEDTA—100x Stock 1 | 10 | mL |
| MS Sulfate—100x Stock 2 | 10 | mL |
| FN Lite Halides—100x Stock 3 | 10 | mL |
| FN Lite P, B, Mo—100x Stock 4 | 10 | mL |
| B5 vitamins (1 mL/L) | 1.0 | mL |
| 2,4-D (10 mg/L final concentration) | 1.0 | mL |
| KNO₃ | 2.83 | gm |
| (NH₄)₂SO₄ | 0.463 | gm |
| asparagine | 1.0 | gm |
| sucrose (1%) | 10 | gm |
| pH 5.8 | | |

### FN Lite Stock Solutions

| Stock | | | | | |
|---|---|---|---|---|---|
| Number | | 1000 mL | | 500 mL | |
| 1 | MS Fe EDTA 100x Stock | | | | |
| | Na₂ EDTA* | 3.724 | g | 1.862 | g |
| | FeSO₄—7H₂O | 2.784 | g | 1.392 | g |
| 2 | MS Sulfate 100x stock | | | | |
| | MgSO₄—7H₂O | 37.0 | g | 18.5 | g |
| | MnSO₄—H₂O | 1.69 | g | 0.845 | g |
| | ZnSO₄—7H₂O | 0.86 | g | 0.43 | g |
| | CuSO₄—H₂O | 0.0025 | g | 0.00125 | g |
| 3 | FN Lite Halides 100x Stock | | | | |
| | CaCl₂—2H₂O | 30.0 | g | 15.0 | g |
| | KI | 0.083 | g | 0.0715 | g |
| | CoCl₂—H₂O | 0.0025 | g | 0.00125 | g |
| 4 | FN Lite P, B, Mo 100x Stock | | | | |
| | KH₂PO₄ | 18.5 | g | 9.25 | g |
| | H₃BO₃ | 0.62 | g | 0.31 | g |
| | Na₂MoO₄—2H₂O | 0.025 | g | 0.0125 | g |

*Add first, dissolve in dark bottle while stirring

### SB1 Solid Medium (Per Liter)

[0233] 1 package MS salts (Gibco/BRL—Cat. No. 11117-066)

[0234] 1 mL B5 vitamins 1000× stock

[0235] 31.5 g sucrose

[0236] 2 mL 2,4-D (20 mg/L final concentration)

[0237] pH 5.7

[0238] 8 g TC agar

### SB166 Solid Medium (Per Liter)

[0239] 1 package MS salts (Gibco/BRL—Cat. No. 11117-066)

[0240] 1 mL B5 vitamins 1000× stock

[0241] 60 g maltose

[0242] 750 mg MgCl₂ hexahydrate

[0243] 5 g activated charcoal

[0244] pH 5.7

[0245] 2 g gelrite

### SB103 Solid Medium (Per Liter)

[0246] 1 package MS salts (Gibco/BRL—Cat. No. 11117-066)

[0247] 1 mL B5 vitamins 1000× stock

[0248] 60 g maltose

[0249] 750 mg MgCl₂ hexahydrate

[0250] pH 5.7

[0251] 2 g gelrite

### SB 71-4 Solid Medium (Per Liter)

[0252] 1 bottle Gamborg's B5 salts with sucrose (Gibco/BRL—Cat. No. 21153-036)

[0253] pH 5.7

[0254] 5 g TC agar

### 2,4-D Stock

[0255] Obtain premade from Phytotech Cat. No. D 295—concentration 1 mg/mL

### B5 Vitamins Stock (Per 100 mL)

[0256] Store aliquots at −20° C.

[0257] 10 g myo-inositol

[0258] 100 mg nicotinic acid

[0259] 100 mg pyridoxine HCl

[0260] 1 g thiamine

If the solution does not dissolve quickly enough, apply a low level of heat via the hot stir plate.

[0261] The article “a” and “an” are used herein to refer to one or more than one (i.e., to at least one) of the grammatical object of the article. By way of example, “an element” means one or more element.

[0262] All publications and patent applications mentioned in the specification are indicative of the level of those skilled in the art to which this invention pertains. All publications and patent applications are herein incorporated by reference to the same extent as if each individual publication or patent application was specifically and individually indicated to be incorporated by reference.

[0263] Although the foregoing invention has been described in some detail by way of illustration and example for purposes of clarity of understanding, it will be obvious that certain changes and modifications may be practiced within the scope of the appended claims.

MEGA

The application's sequence listing, which the Patent Office published only in electronic form, follows.

SEQUENCE LISTING (39 sequences)

SEQ ID NO: 1 - DNA, 21 bp, artificial
  PEPC4A
tctctgcagagcctcatcgag

SEQ ID NO: 2 - DNA, 21 bp, artificial
  PEPC4B
ttcagaaactccagaagccag

SEQ ID NO: 3 - DNA, 21 bp, artificial
  DNA sequence corresponding to artificial star sequence used to silence PEPC (396h-PEPC4A)
ctcgatgaagctctgcagaga

SEQ ID NO: 4 - DNA, 21 bp, artificial
  DNA sequence corresponding to artificial star sequence used to silence PEPC (396h-PEPC4B)
ctggcttccggagtttctgaa

SEQ ID NO: 5 - DNA, 22 bp, artificial
  DNA sequence corresponding to artificial star sequence used to silence PEPC (169r-PEPC4A)
ttcgatgaggtctctgcagagc

SEQ ID NO: 6 - DNA, 645 bp, artificial
  amiRNA precursor
  misc_feature (600)..(600): n is a, c, g, or t
ggatccgtcccccagatttgctaggacaccaccgtacccacaccccggatcagttaatatcgtagacataatggccctccctgccatctctctgcagagcctcatcgagcatcatgcatgcagcaggctgtgctgtggacctgatcgagtttcaattgatccaagcaagcaagagggctcgatgaagctctgcagagaaattgcagagagagaccagtcgttgatcggtcggagatctccccgaatcgatctcgatcggccggaattttgggggccggccgggaggtggatgatggggggtgattaccatctaggcggcgccgtgttggatgatgtaccaacatatcactataggctactttgggaacctcagatccccttcgggattggaggaaattgagatggaaatgaactaatttcttctctaacccccttcaatcacgaaggggattcgagtttccaaactagccctatatatatcagagctagggagggatattgctgcaacatgcatcacgaggtacagatatataattagggttctgctgcaatgttttgactatagatcgttagtgatctgctgtaattaataataatggngatctcgaagcaattctaaacatcatagtagcaggcccaccatgg

SEQ ID NO: 7 - DNA, 645 bp, artificial
  amiRNA precursor
  misc_feature (600)..(600): n is a, c, g, or t
ggatccgtcccccagatttgctaggacaccaccgtacccacaccccggatcagttaatatcgtagacataatggccctccctgccatcttcagaaactccagaagccagcatcatgcatgcagcaggctgtgctgtggacctgatcgagtttcaattgatccaagcaagcaagagggctggcttccggagtttctgaaaattgcagagagagaccagtcgttgatcggtcggagatctccccgaatcgatctcgatcggccggaattttgggggccggccgggaggtggatgatggggggtgattaccatctaggcggcgccgtgttggatgatgtaccaacatatcactataggctactttgggaacctcagatccccttcgggattggaggaaattgagatggaaatgaactaatttcttctctaacccccttcaatcacgaaggggattcgagtttccaaactagccctatatatatcagagctagggagggatattgctgcaacatgcatcacgaggtacagatatataattagggttctgctgcaatgttttgactatagatcgttagtgatctgctgtaattaataataatggngatctcgaagcaattctaaacatcatagtagcaggcccaccatgg

SEQ ID NO: 8 - DNA, 872 bp, artificial
  amiRNA precursor
ggatccccctccacacagagaagcaaagaaaccacaccacagtcgtaggggaagggagaggagggagggtggcttctgctgggttgccatgtgctatgaggtagagaacgggatgtctctgcagagcctcatcgagctcctggaacctgaaggcgtctcagcttgctgtgctgtggcttagaacttagtttcgatgaggtctctgcagagccacctagttctcttcctctcgtgtatggccctcaagcaccgtcaagagatctaggacctgcattcatatatcatcagcccactccagaggaaacgtaagggcaagtatgcatctaacctcaagttgacatatttctatttctcctgcaattttgggtcttccaaaaaaatcagaaatttgagatatatgaatattattacaaacatacagggcttgcatacaatacaagcccaagccccatccggcatcatacgtcaaatttcatacatgcatctgtcagacaatatatatcctcactattttgtaccattatcgcatgctaatctttgatgtttgatggaaaagagccacttacttgtatcccctattcgcctgatggcgatacagacgaaaaggccaaatcgaagtacagcaggcgctgcacgacaagattcctcgaggctcctgatgctcagcaacagcaaattaaatgtcgtcatagcatctacagtaattaaattgtgtggcatacaaaagaaaacatgtactagcatgcatgacaggatatcggggcagaaaggtagcatcagctagcgttggagttgatgcgtaccatgttgagaaagtgttgcattcttttattcaaaaggggcaaaatgaatagacgataggttacccatgg

SEQ ID NO: 9 - DNA, 60503 bp, artificial
  PHP38464
  misc_feature (987)..(987): n is a, c, g, or t
gtttacccgccaatatatcctgtcaaacactgatagtttaaactgaaggcgggaaacgacaatctgatcatgagcggagaattaagggagtcacgttatgacccccgccgatgacgcgggacaagccgttttacgtttggaactgacagaaccgcaacgttgaaggagccactcagcaagctggtacgattgtaatacgactcactatagggcgaattgagcgctgtttaaacgctcttcaactggaagagcggttaccagagctggtcacctttgtccaccaagatggaactgcggccgctcattaattaagtcaggcgcgcctctagttgaagacacgttcatgtcttcatcgtaagaagacactcagtagtcttcggccagaatggccatctggattcagcaggcctagaaggccatttaaatcctgaggatctggtcttcctaaggacccgggatatcgctatcaactttgtatagaaaagttgggccgaattcgagctcggtacggccagaatggcccggaccgggttaccgaattcgagctcggtaccgggcggccgaagctggccttctaggcccggaccgggtgacccggaccggaattcgagctccaccgcggtggcggccgcattcgcaaaacacacctagactagatttgttttgctaacccaattgatattaattatatatgattaatatttatatgtatatggatttggttaatgaaatgcatctggttcatcaaagaattataaagacacgtgacattcatttaggataagaaatatggatgatctctttctcttttattcagataactagtaattacacataacacacaactttgatgcccacattatagtgattagcatgtcactatgtgtgcatccttttatttcatacattaattaagttggccaatccagaagatggacaagcctaggtgggcctgctactatgatgtttagaattgcttcgagatcnccattattattaattacagcagatcactaacgatctatagtcaaaacattgcagcagaaccctaattatatatctgtacctcgtgatgcatgttgcagcaatatccctccctagctctgatatatatagggctagtttggaaactcgaatccccttcgtgattgaagggggttagagaagaaattagttcatttccatctcaatttcctccaatcccgaaggggatctgaggttcccaaagtagcctatagtgatatgttggtacatcatccaacacggcgccgcctagatggtaatcaccccccatcatccacctcccggccggcccccaaaattccggccgatcgagatcgattcggggagatctccgaccgatcaacgactggtctctctctgcaatttctctgcagagcttcatcgagccctcttgcttgcttggatcaattgaaactcgatcaggtccacagcacagcctgctgcatgcatgatgctcgatgaggctctgcagagagatggcagggagggccattatgtctacgatattaactgatccggggtgtgggtacggtggtgtcctagcaaatctgggggacggatccatggcggcggcggccggggagtgggccgggaagcgcgaacgaagctggagatggttggaccggcgcggcgtgttgctcgtgctgctcctctgctgcgagttgattgatcaatgcagggcgccggccggtggcttcaaatagggatggggagttggcgagtgtgtggtcggcgtgtgcaacgggattggaaaggcatgcatgtgatcggcggtaagggtagccgagacgtgcgcgcggctgtggctacgctgcttttggctgggatcgctgctgtggacgtactttgtcactgcgcacttgcctgcttgtgttattccgctggctaatattgcctgtttgcaggacgtggagaggggtgtctgctagtgctagctagtggtaaggatggggacgatgcttcaaataactcctcgtgttcttctctagtctaactaaacgaactaaattaaaaaaataagaaagaaattgtttatttagtttattaagttagactagagaaaaaccgcgcaagtatgcatttagagtaccatcttcattcttagctagtggtaaccgcaaaggggaccgggagagctgcggcgcaccttgctcctggatcgtttttggcttggctttgctgctgttaacgtgctttgtcactgctcacctgccttcttgtgttattcggttggctgatgggtttgcaggatggggagaggggtgtctgtttgcagtcaaggccggattctggggatcggtagaatttggaggtttgcttgcacgcgatgtggagagaggtgtctgttagcaacggaggatgcatggcgctggaggaaggctttgcagggtgtggaggagagggtgcctgttatccagtaatgttaatgttaggaacatagatgtcctatatccatgtaaactgtggaaacagaacttaatttccttaggagaccgggaaacaaaaaatgaacttgtggttaaggatatggactataattttgtggttcaaagaaaggtattggtatacatggctgccgtagggataagggtcatacatggctgccgtagggataagggtgttgttactctaccaagggcaccatacaggtggctgcacagcattcaggcgctgccaaatctagcgcgcacatcactgggtcaagccgacacagatttggacaatacgatgtgtagcagctggtggtggtgaagatatgcggatttaagagagaggtggatttgggttgggaggagcaacttgcatcgtcgtggatctccacacaaaaaagaagaattggaaatgtataatactatacatatgcttaaatgaaagtatttactgaattgtggatcgatgcattaattgtcatcacaagtgaaaattaggtaataatgagtactagttaatagttgagcacggaaaaagcaagcttggatccgatatcgatgggccctggccgaagcttggtcacccggtccgggcctagaaggccagcttcaagtttgtacaaaaaagcaggctccggccagaatggcccggaccgggttaccgaattcgagctcggtaccaggtttcgaggaagaagccacgaagtgtgtttgatactacatgtgttcaggaaactacatgtatatgtttaatactaatatgatgtggaattttacaatggacagtgtcactaggctttgtcgtttacgaattaccatcttagtctctatgattaggtgaagtgtttagaaacttttccatatagtctaggcttgctctttgggatcatgcgaggagccacttaaataaatttaagagtaaaatattatgtaaagtatgagtccaaaatcaatttttcttgacgaaattattctattattttgttccttataagtctagtcaactgtcgtaaatcagtataccttagacgataagcctaaattgattacgaaaggtgcttgattcttaattggttgtccatcaacgttgaaacgtattttctcaagtaaatacatcttttgagaaaacatatacaacttaggatgacatatcttgcgacttgcatgaaggcaggttacaattacgtttcaagctaagattttctctaaatcggtagtaggaaagttttaacggtcgctgaaagtttatgtttttatcgactgaccggatcaaccgataattaaaaaaattattttgaaaatttgatgtcacaaataaataagaaatttgaatttttttttatagagtttttgcatagtaatctttgtattttacttttttttttaaatcatgtttagacaaatagaaatggcatgaataatatgtgagatattgaaagtgattagtttgaatgaaattaattttaagaaacttgagtttgattgtttttctttaggcaatacaaaatttgatttggagtgcaaataaaatgtcgtcttgtttagtatgctcggactcttagataagcatgcttacctctttggaatgacgtcaatttggatgattttatatacgttcgcaatgacgtcgactgaatcattttatacgattatagtcatgattaaactagactcagttggtaagtatgaaaaaatgggtctaaattaacgtggcacacctaaagattcggtactaaaataaagaaaacctagctaggaaaactaaatatctcaagcatacaatttttattttcttggatgatgatgtcaatgcaggtcatttatgtattaagtattaaccaatactagctagggtttcgaatccaacaagtcagtttctcatctcacggacaatcatgaacttgagcttgaaaaggctcattataaacaaagtaatagcccaaatcataagtggcggaaagattaagagtagtcctggacgttcggttatctaattcggctttggttcgtatacattcggttatcgtttttttttgttctaaagtttagtatttattcgatttttgaaattttggttcgattttggttttgttccagttttttcggttttaaaatttggtatccattcggttattttgctttgaatattttgggatatttcggttgtttttgaatatttgtggttattttcgagtatttttactattttatataaatttttaagtatttttaattatttaatctagaaattattaatatttttgacaatataattatatttcggatatttttggttacattaaatattttgattcggtttcagttctttcagttataggatttagttttcattcggttatttttaaattttcggtttggttcgattatttttgctttggttttggtcgggtacatacagtttgaattatttgcccacacctaattaagagcatcaactaaagataatcatgagtcttgggctttacaaggcccattaagatcaaagtgaaatgcccaaatcatatatggcaaccagtggaaagcttaagagcatcatcaactaaacaagagccattttctcagttgtttattcattttctccatcgtacatagaaagagacaactagtcataactccaattttttgaaccttcccactccaacaatgccgattcaagtagcgagagcttaacaatcagcaataatggtagaaaaacgagtaggtccaaagatatgcaagactcggaataactttcagtttctgagtaacacaaagtattgatgatggattgtgttattcaccatgaaagtaacggatagagaaatgttgcttgagaatgagactgacaaatcagactgtcatattcttgtgggttttctctatgcaggtgaaaccaaaagtacaagggtactatgtaccttcagcttagaaatgatgtgttttctacacttttctcttcttttttttcttttcatctcacatgaatcaaaaagagaaagcttaattacattaaaggttgatgtgatatttactttctaaatatttgctagaagaaattataatgataacattaaattaagttatagtcatttctatttcggttgtctcccactttctgctatgcttttacaacaacagttcaagatttggaatcgttttctttctccaccaatcgtagtaatacttctttttgtgtttgttgaaattttgcaagattctctcttcctctggttaatacacataacttacttggtaagcttggctgcattttcttttcaagcttttaatcaaagactcactagaaattgcaaaggcaaacataaaattatgtgatcaaactcctactgtgagtttttggttacaaacaaaagttaaaaacaaaagcttgatatttaaaagataaactcaacacatatgcatttgactggcgcacagaagacaattcaagacttgggaaaacagtgagccatcaaaatcgtcagataattcagggaatatattgaatgtggagatgtggtaatcacactattgcacacaaagagtggcaaacaagcggcgcccttggtttggtatagtaagagacaattgttttggactgtttgtgttgccatattcacaaaaatactattgagctatgtatgttaaacattatggtcaatgagtagtagtgaacattcaagtttttttttttttccacttcaagtttttcatcttattattatttttcgttgtgatgcagtagtacggcccatcttcaccagtagtatatcaaagccgaaacagatgacaaattgtttaacatgcacttggattattattgagagttgaaatacaaaggcccgttacaagcccaaacgaaggtacataaaagaaaagcagaaaatgaaaacgaaatcgatagggataagtttttccaactgacggaaacacaaactacaccaggtgaaatagatcacctcccaagtgcatgagacacgaaccaaccacttatcatcagatcacaaaaacctaggcgccctagccagtgttctgcatgccggcggcgatgcccttcatggtgaggatgagcgtgtcttccaggccgggcgggtactcgctcgccgggttcagcttgaccagtccggcgggcttgttctcgtcggcgaactccttggacagcggcggctggggcgtcaccttgaagttggggtcccttatccgcttcagcgtgtaggcctggaacacgttcagggtggtgatgtaggggttgcgcagcaccagcccctgcttcaggaatggatcgccttcaagaatatccttgtgcccagcgatctggaggagaagctgctgtgtctccacgtatttgtccctgagctgcttcccaaagggcttgagttcttccgccacaagcagctcgtcatacaagccggcaatgccggggtctcccttggcgaaaatcatctccagcaggtccagggtgaccctgaagaatggccactcgttgtacatctctttgaggacctggaagttcctgacgtccttgtcgatggcgaacttgaaggcggcgccgactcccagccacacgggaaggtggaacctggtctgagtccacgagaagatccaggggatggcgcgcagggtcgtgatgccgccgccgggcctcctcttggctggccggctgccgatgttcatcctcccgtactcggtctccggtgtagccgatctgaagtactcgacgaagcgcggctccttgacgacgaccgagcggtactcctccgtggccacgaccgccatctcgtccatgagcttgcgccactcgggcttgggagagaccggcgggtgcatgccgtgctccagcgtggcggccgtgaagcgctgcagagtctggaagcacaggtgctcctccccgaagcagaactcgatgacctcgccctgcaccgtcacacggatggacccgttgatggtgtccggcggctgggacaggatggcaaggtgcgtgggcccgccacccctgcccacggtgcctccgcggccgtggaacaaggtgagcttgacgccgtagcgcttggccacctgcgccatctcctcctgcgccttgtacagctgccacgccgcggacaggcggccggcgtccttgccggagtcggagtagccgaccatgacctgctgcttgcccttgatccggtccatgtaccagtccaccgagaagaggcgctccacggacgcgggcgccgactgcaggtcggccagcctctcgaacagcggcaccacgggcagcggctgcttgatgccgcactcgcgctgcaggagctctacggcgagcacgtccgagggggccgtcgccatagagatgatgtaggggccgaagctgtcgggcgggagctccgcgaggacgtggaacgcgccgatgacgtcggcgatctcgtcggtctggggaaggtccgggggcagcagcgggcgcttgcctcgtagctccgacagcagccactcctgcctcttgtcctcggaccactcgcggtacgacccgatgccgaggtgcgtggtgatggcgtcgatcacgtcggtgtgccgctccgactcctgccggatgtccagcttcaccagggagagcccgaacgtgaacacctggcgcaggaggtccaggaggctcccgtccgcgatggccttgtcgccgcagtcacacagtgatttgtagcacagctcaagtggctcaaggaactcttcgatactggtaaatgacgattccgctgaaatttcagaaactccagatgccagcagatggcgagcacgctcgcgtgtgttgtacagcttgtcccttacatggcctagtatcacccggtagggctcgtttggaggaatttgcttccagaattctatgtaatacttggtaactttggaaccagacgaactgtggagctcttcggcacgaacacgaagctcatcgttgcagcgccacatagagagctcaaacatcagctcttcaatctgatcgatgtacaagtttgcagccatcattctggccagcaagcatacatctcttgtcacctccggggtaactcttggatttcctatatagcgatagattgcaaagatatacaggcttagaaaaaacatataattctgtatatataattttctggcgagaaaagaaaaacgttagccttgaatattgacaggacaagtactgatataatataagcactctttgatatataaaataatactacacgtataattctgtgatataaaaaattcaacaagttaggttccaggttgcaatataaagatttgattaaattatgcttatatgttgtgctagcatgtatggatgataaatttttattagtgaggtgtactaaataatttctattttaaaattctagctcctgagagctcgaaatgatagactagtttttctgaacatctattgcagtcagagtaaagcaggaaggtttctctcaagctgaaagacagagagctcctgccactttattgaaaagggtaggcagaaatgtaccatcgcggtcaccacccatccaagaagagaaccgaatgagagaaacattgtagggaaggcgctcattgatgccgatattcttcagggctgtatccacacggcgcaagaacttaggcacgcccttccatacagtctcatggatgtagctcatcccatagcgcatttcgtcctggggggtgggttgtgccctcctgatttcatcggttctgaaggctgcttggatctgtgaacacccaagaaaaggaattagaactaaacaacccaaacaacaaaaataccactttggtggcttgaagcagtaaacttctcaggtggtctgcatcatatatatgcaccatgagagagacgctctttaccgagtgctcagtgatgacattatgactcgtctgaaatttgtaacactaggaacttgagcatagcctagctaattgagggtgtggagttaaggctatctaggtttgattcctcatcaaggagaaactggatgccctacttgttaggaaaatataatgatgagtacaacaacttgattacaactaaaccattaatgcatctgtggtaccgaagttctactcaaatggctctatatgagtaagagatctttgtacaaaatgatcttttttaagtaaaaggaaaatgctttgagcacagctggagaatagcatataaataattcagtgtagttttcatcaagtggtcttcaacattgaatcttaagtcaagtcggcctcatataaataattctgttatacatgtagcagttctctcattgcattgttaaaacataaatgtgcagtctagttctttcctgattaggttagtttctactttggagtttgcaaagacagtttaaatagtggaaaagtttggttgtttattaccttagcttgataataatgaatatttatttatatgtgttttaatgggagaacctgacctgacttgacatataaattgaagatttctctggcgcactaacttacacgtgtcgtgctcgatgtcttgcaagctcatgagtccacgtgtactgtgcatgtgttctattctatctctatcaaagaatgaatgtctcttgataaagttcttgcattccctggtgtgaaatgtaatatgtacgtacctctctctgcagagcctcatcgagctcctgcttgtcgtcgtcagtgatgtccttggcattcagctgggtcagacaattccggatcctgcagcgacaagaccgacatttttatttatcaaaaataataataatggttaagacttaagggtatataacgtgagtagcatatcgatcaagccattgaaaaatatatacccggcatttttttgcaggagcgagcggcgggcggactgtgtgggatgcgcggtgaagacgaggtcgatggtctggttcttgagcgcctcgaacacctcctcgggggacttgccgacctcggacacgaggcgcttgagcgtctcctcgatgtcggactcggtggtggcggagccctcgtcggcgaacccacctttcttgagcttgctgttgcggcggcggcgcgcgatctgcacctcctcggcgaggttggcgaggttgagcatgtgcaggatggagctcgccacgaggatggcgtcggcgggggccagccccgtgagcttggcgccgagctcgcccagcttcgtcgtgtctcctttgccctcgtagtcggctgagacctcgtagcactcctggacctgcatgcatgcattacagtaagcactggcggggagacgtacgagcagtgccgcgcgcaggcggcaaccggtcgaagaagaaatgggcggcggcagtggttagttacaaattcgcgaaggctgggcccgtggaggtcctggaggatgttgaggaagcggtcgacgagcagcgcatcgtactcgatgagcttgtcgtcctcggagaccttgcctgggaccagctgacggagctgcgcgtcgatggagtggtgcttctcgccggggccgggagccttggtcgacgccatggcgcggcgggaagctaagcacggaagcgagatggttggagcggcacggcgtgctgctcgtgctgctgcgatgcgattggtgatcaatgcagtgcgcgggtgggttcaaatagggatggggagtcgttggcgggcgggtgtgtgtgtggctgtgcacgggaacgggcggccctcggcgttcggaaaggcgcggccttgggcatgtgatcggcggtaaccgcaacggaaccggctgcggctgaggctcctttttggcttggcttgctgctgttagcggccggaggggatgtggagaggggtgtctgctactgctggcggcaatcgcaaggggacctggagagctgcggctgcggcttgggcttgctcctccttgctcctttttggcttggctcggtgctgttgacgtgctttgtcactgctcacctgccttcttgtgttattccgttggctaattgggtagcaggatgtggagagggcgtcccttagcagttaatgctggattcgggggatcgcaagaatttggaggaatgctttgcaggatgtggagagggcgtctgttagcaagtaggctgcatcggagtgaagaatctggagggatgtggcgagggtgtctgtttgcaggatgtggttgagggtgcagtgaggcggctgtggctaagagtcgtctttgtagataattttttgtttccattaacatttaaattaaatttatgattttaaaatttagtttcctaggaggataaggaaaaaaaaaagtgaacctgtggttaggaactcggcattttattgttccaaataagtgttcaacctgaacaagaagtgccgctataataaattattgtggttcaagaaaaagtatatttaattcttggtatgcatacatggctattgtagggataaggggtgtcattctacgaagggcaccatacatatagggataaggatgttgttctaccaagggcaccgtacaggtgtctcctccattggcgccgaccgtgcacaagccaacaaagatatgcacgatgcgatgtgttgttggcacttggcagcggtgaacatgcacggattgaagagagaggtggatttgggttgggatatccacacaaaaagaagaattttaaaatatagactgtgtgcttaaatgtacatatttacagaattatggtctaatgcatttgttatcacaattagaaatgagataatgctaggtaattgaaaatagaaaaaccatcgaatgaccttacatttatattagtagctaaccacgtgtcctaacaccattacatcgctagatcctcgacatactatcaacattgtgcattacatcgagctaagtaaagaactgatcggccaggatccgatatcgatgggccctggccgaagcttggtcacccggtccgggcctagaaggccgatctcccgggcacccagctttcttgtacaaagtggccgttaacggatcggccagaatggcccggaccgaagctggccgctctagaactagtggatctcgatgtgtagtctacgagaagggttaaccgtctcttcgtgagaataaccgtggcctaaaaataagccgatgaggataaataaaatgtggtggtacagtacttcaagaggtttactcatcaagaggatgcttttccgatgagctctagtagtacatcggacctcacatacctccattgtggtgaaatattttgtgctcatttagtgatgggtaaattttgtttatgtcactctaggttttgacatttcagttttgccactcttaggttttgacaaataatttccattccgcggcaaaagcaaaacaattttattttacttttaccactcttagctttcacaatgtatcacaaatgccactctagaaattctgtttatgccacagaatgtgaaaaaaaacactcacttatttgaagccaaggtgttcatggcatggaaatgtgacataaagtaacgttcgtgtataagaaaaaattgtactcctcgtaacaagagacggaaacatcatgagacaatcgcgtttggaaggctttgcatcacctttggatgatgcgcatgaatggagtcgtctgcttgctagccttcgcctaccgcccactgagtccgggcggcaactaccatcggcgaacgacccagctgacctctaccgaccggacttgaatgcgctaccttcgtcagcgacgatggccgcgtacgctggcgacgtgcccccgcatgcatggcggcacatggcgagctcagaccgtgcgtggctggctacaaatacgtaccccgtgagtgccctagctagaaacttacacctgcaactgcgagagcgagcgtgtgagtgtagccgagtagatcccccggtcgccaccatggcctcctccgagaacgtcatcaccgagttcatgcgcttcaaggtgcgcatggagggcaccgtgaacggccacgagttcgagatcgagggcgagggcgagggccgcccctacgagggccacaacaccgtgaagctgaaggtgaccaagggcggccccctgcccttcgcctgggacatcctgtccccccagttccagtacggctccaaggtgtacgtgaagcaccccgccgacatccccgactacaagaagctgtccttccccgagggcttcaagtgggagcgcgtgatgaacttcgaggacggcggcgtggcgaccgtgacccaggactcctccctgcaggacggctgcttcatctacaaggtgaagttcatcggcgtgaacttcccctccgacggccccgtgatgcagaagaagaccatgggctgggaggcctccaccgagcgcctgtacccccgcgacggcgtgctgaagggcgagacccacaaggccctgaagctgaaggacggcggccactacctggtggagttcaagtccatctacatggccaagaagcccgtgcagctgcccggctactactacgtggacgccaagctggacatcacctcccacaacgaggactacaccatcgtggagcagtacgagcgcaccgagggccgccaccacctgttcctgtagcggcccatggatattcgaacgcgtaggtaccacatggttaacctagacttgtccatcttctggattggccaacttaattaatgtatgaaataaaaggatgcacacatagtgacatgctaatcactataatgtgggcatcaaagttgtgtgttatgtgtaattactagttatctgaataaaagagaaagagatcatccatatttcttatcctaaatgaatgtcacgtgtctttataattctttgatgaaccagatgcatttcattaaccaaatccatatacatataaatattaatcatatataattaatatcaattgggttagcaaaacaaatctagtctaggtgtgttttgcgaatgcggccgccaccgcggtggagctcgaattccggtccgggcctagaaggccagcttcggccgccccgggcaactttattatacaaagttgatagatatcggaccgattaaactttaattcggtccgaagcttgcatgcctgcagtgcagcgtgacccggtcgtgcccctctctagagataatgagcattgcatgtctaagttataaaaaattaccacatattttttttgtcacacttgtttgaagtgcagtttatctatctttatacatatatttaaactttactctacgaataatataatctatagtactacaataatatcagtgttttagagaatcatataaatgaacagttagacatggtctaaaggacaattgagtattttgacaacaggactctacagttttatctttttagtgtgcatgtgttctcctttttttttgcaaatagcttcacctatataatacttcatccattttattagtacatccatttagggtttagggttaatggtttttatagactaatttttttagtacatctattttattctattttagcctctaaattaagaaaactaaaactctattttagtttttttatttaataatttagatataaaatagaataaaataaagtgactaaaaattaaacaaataccctttaagaaattaaaaaaactaaggaaacatttttcttgtttcgagtagataatgccagcctgttaaacgccgtcgacgagtctaacggacaccaaccagcgaaccagcagcgtcgcgtcgggccaagcgaagcagacggcacggcatctctgtcgctgcctctggacccctctcgagagttccgctccaccgttggacttgctccgctgtcggcatccagaaattgcgtggcggagcggcagacgtgagccggcacggcaggcggcctcctcctcctctcacggcaccggcagctacgggggattcctttcccaccgctccttcgctttcccttcctcgcccgccgtaataaatagacaccccctccacaccctctttccccaacctcgtgttgttcggagcgcacacacacacaaccagatctcccccaaatccacccgtcggcacctccgcttcaaggtacgccgctcgtcctcccccccccccctctctaccttctctagatcggcgttccggtccatgcatggttagggcccggtagttctacttctgttcatgtttgtgttagatccgtgtttgtgttagatccgtgctgctagcgttcgtacacggatgcgacctgtacgtcagacacgttctgattgctaacttgccagtgtttctctttggggaatcctgggatggctctagccgttccgcagacgggatcgatttcatgattttttttgtttcgttgcatagggtttggtttgcccttttcctttatttcaatatatgccgtgcacttgtttgtcgggtcatcttttcatgcttttttttgtcttggttgtgatgatgtggtctggttgggcggtcgttctagatcggagtagaattctgtttcaaactacctggtggatttattaattttggatctgtatgtgtgtgccatacatattcatagttacgaattgaagatgatggatggaaatatcgatctaggataggtatacatgttgatgcgggttttactgatgcatatacagagatgctttttgttcgcttggttgtgatgatgtggtgtggttgggcggtcgttcattcgttctagatcggagtagaatactgtttcaaactacctggtgtatttattaattttggaactgtatgtgtgtgtcatacatcttcatagttacgagtttaagatggatggaaatatcgatctaggataggtatacatgttgatgtgggttttactgatgcatatacatgatggcatatgcagcatctattcatatgctctaaccttgagtacctatctattataataaacaagtatgttttataattattttgatcttgatatacttggatgatggcatatgcagcagctatatgtggatttttttagccctgccttcatacgctatttatttgcttggtactgtttcttttgtcgatgctcaccctgttgtttggtgttacttctgcaggtcgactttaacttagcctaggatccacacgacaccatgtcccccgagcgccgccccgtcgagatccgcccggccaccgccgccgacatggccgccgtgtgcgacatcgtgaaccactacatcgagacctccaccgtgaacttccgcaccgagccgcagaccccgcaggagtggatcgacgacctggagcgcctccaggaccgctacccgtggctcgtggccgaggtggagggcgtggtggccggcatcgcctacgccggcccgtggaaggcccgcaacgcctacgactggaccgtggagtccaccgtgtacgtgtcccaccgccaccagcgcctcggcctcggctccaccctctacacccacctcctcaagagcatggaggcccagggcttcaagtccgtggtggccgtgatcggcctcccgaacgacccgtccgtgcgcctccacgaggccctcggctacaccgcccgcggcaccctccgcgccgccggctacaagcacggcggctggcacgacgtcggcttctggcagcgcgacttcgagctgccggccccgccgcgcccggtgcgcccggtgacgcagatctgagtcgaaacctagacttgtccatcttctggattggccaacttaattaatgtatgaaataaaaggatgcacacatagtgacatgctaatcactataatgtgggcatcaaagttgtgtgttatgtgtaattactagttatctgaataaaagagaaagagatcatccatatttcttatcctaaatgaatgtcacgtgtctttataattctttgatgaaccagatgcatttcattaaccaaatccatatacatataaatattaatcatatataattaatatcaattgggttagcaaaacaaatctagtctaggtgtgttttgcgaatgcggccgccaccgcggtggagctcgaattcattccgattaatcgtggcctcttgctcttcaggatgaagagctatgtttaaacgtgcaagcgctactagacaattcagtacattaaaaacgtccgcaatgtgttattaagttgtctaagcgtcaatttgtttacaccacaatatatcctgccaccagccagccaacagctccccgaccggcagctcggcacaaaatcaccactcgatacaggcagcccatcagtccgggacggcgtcagcgggagagccgttgtaaggcggcagactttgctcatgttaccgatgctattcggaagaacggcaactaagctgccgggtttgaaacacggatgatctcgcggagggtagcatgttgattgtaacgatgacagagcgttgctgcctgtgatcaaatatcatctccctcgcagagatccgaattatcagccttcttattcatttctcgcttaaccgtgacaggctgtcgatcttgagaactatgccgacataataggaaatcgctggataaagccgctgaggaagctgagtggcgctatttctttagaagtgaacgttgacgatcgtcgaccgtaccccgatgaattaattcggacgtacgttctgaacacagctggatacttacttgggcgattgtcatacatgacatcaacaatgtacccgtttgtgtaaccgtctcttggaggttcgtatgacactagtggttcccctcagcttgcgactagatgttgaggcctaacattttattagagagcaggctagttgcttagatacatgatcttcaggccgttatctgtcagggcaagcgaaaattggccatttatgacgaccaatgccccgcagaagctcccatctttgccgccatagacgccgcgccccccttttggggtgtagaacatccttttgccagatgtggaaaagaagttcgttgtcccattgttggcaatgacgtagtagccggcgaaagtgcgagacccatttgcgctatatataagcctacgatttccgttgcgactattgtcgtaattggatgaactattatcgtagttgctctcagagttgtcgtaatttgatggactattgtcgtaattgcttatggagttgtcgtagttgcttggagaaatgtcgtagttggatggggagtagtcatagggaagacgagcttcatccactaaaacaattggcaggtcagcaagtgcctgccccgatgccatcgcaagtacgaggcttagaaccaccttcaacagatcgcgcatagtcttccccagctctctaacgcttgagttaagccgcgccgcgaagcggcgtcggcttgaacgaattgttagacattatttgccgactaccttggtgatctcgcctttcacgtagtgaacaaattcttccaactgatctgcgcgcgaggccaagcgatcttcttgtccaagataagcctgcctagcttcaagtatgacgggctgatactgggccggcaggcgctccattgcccagtcggcagcgacatccttcggcgcgattttgccggttactgcgctgtaccaaatgcgggacaacgtaagcactacatttcgctcatcgccagcccagtcgggcggcgagttccatagcgttaaggtttcatttagcgcctcaaatagatcctgttcaggaaccggatcaaagagttcctccgccgctggacctaccaaggcaacgctatgttctcttgcttttgtcagcaagatagccagatcaatgtcgatcgtggctggctcgaagatacctgcaagaatgtcattgcgctgccattctccaaattgcagttcgcgcttagctggataacgccacggaatgatgtcgtcgtgcacaacaatggtgacttctacagcgcggagaatctcgctctctccaggggaagccgaagtttccaaaaggtcgttgatcaaagctcgccgcgttgtttcatcaagccttacagtcaccgtaaccagcaaatcaatatcactgtgtggcttcaggccgccatccactgcggagccgtacaaatgtacggccagcaacgtcggttcgagatggcgctcgatgacgccaactacctctgatagttgagtcgatacttcggcgatcaccgcttccctcatgatgtttaactcctgaattaagccgcgccgcgaagcggtgtcggcttgaatgaattgttaggcgtcatcctgtgctcccgagaaccagtaccagtacatcgctgtttcgttcgagacttgaggtctagttttatacgtgaacaggtcaatgccgccgagagtaaagccacattttgcgtacaaattgcaggcaggtacattgttcgtttgtgtctctaatcgtatgccaaggagctgtctgcttagtgcccactttttcgcaaattcgatgagactgtgcgcgactcctttgcctcggtgcgtgtgcgacacaacaatgtgttcgatagaggctagatcgttccatgttgagttgagttcaatcttcccgacaagctcttggtcgatgaatgcgccatagcaagcagagtcttcatcagagtcatcatccgagatgtaatccttccggtaggggctcacacttctggtagatagttcaaagccttggtcggataggtgcacatcgaacacttcacgaacaatgaaatggttctcagcatccaatgtttccgccacctgctcagggatcaccgaaatcttcatatgacgcctaacgcctggcacagcggatcgcaaacctggcgcggcttttggcacaaaaggcgtgacaggtttgcgaatccgttgctgccacttgttaacccttttgccagatttggtaactataatttatgttagaggcgaagtcttgggtaaaaactggcctaaaattgctggggatttcaggaaagtaaacatcaccttccggctcgatgtctattgtagatatatgtagtgtatctacttgatcgggggatctgctgcctcgcgcgtttcggtgatgacggtgaaaacctctgacacatgcagctcccggagacggtcacagcttgtctgtaagcggatgccgggagcagacaagcccgtcagggcgcgtcagcgggtgttggcgggtgtcggggcgcagccatgacccagtcacgtagcgatagcggagtgtatactggcttaactatgcggcatcagagcagattgtactgagagtgcaccatatgcggtgtgaaataccgcacagatgcgtaaggagaaaataccgcatcaggcgctcttccgcttcctcgctcactgactcgctgcgctcggtcgttcggctgcggcgagcggtatcagctcactcaaaggcggtaatacggttatccacagaatcaggggataacgcaggaaagaacatgtgagcaaaaggccagcaaaaggccaggaaccgtaaaaaggccgcgttgctggcgtttttccataggctccgcccccctgacgagcatcacaaaaatcgacgctcaagtcagaggtggcgaaacccgacaggactataaagataccaggcgtttccccctggaagctccctcgtgcgctctcctgttccgaccctgccgcttaccggatacctgtccgcctttctcccttcgggaagcgtggcgctttctcatagctcacgctgtaggtatctcagttcggtgtaggtcgttcgctccaagctgggctgtgtgcacgaaccccccgttcagcccgaccgctgcgccttatccggtaactatcgtcttgagtccaacccggtaagacacgacttatcgccactggcagcagccactggtaacaggattagcagagcgaggtatgtaggcggtgctacagagttcttgaagtggtggcctaactacggctacactagaaggacagtatttggtatctgcgctctgctgaagccagttaccttcggaaaaagagttggtagctcttgatccggcaaacaaaccaccgctggtagcggtggtttttttgtttgcaagcagcagattacgcgcagaaaaaaaggatctcaagaagatcctttgatcttttctacggggtctgacgctcagtggaacgaaaactcacgttaagggattttggtcatgagattatcaaaaaggatcttcacctagatccttttaaattaaaaatgaagttttaaatcaatctaaagtatatatgagtaaacttggtctgacagttaccaatgcttaatcagtgaggcacctatctcagcgatctgtctatttcgttcatccatagttgcctgactccccgtcgtgtagataactacgatacgggagggcttaccatctggccccagtgctgcaatgataccgcgagacccacgctcaccggctccagatttatcagcaataaaccagccagccggaagggccgagcgcagaagtggtcctgcaactttatccgcctccatccagtctattaattgttgccgggaagctagagtaagtagttcgccagttaatagtttgcgcaacgttgttgccattgctgcagggggggggggggggggggacttccattgttcattccacggacaaaaacagagaaaggaaacgacagaggccaaaaagcctcgctttcagcacctgtcgtttcctttcttttcagagggtattttaaataaaaacattaagttatgacgaagaagaacggaaacgccttaaaccggaaaattttcataaatagcgaaaacccgcgaggtcgccgccccgtaacctgtcggatcaccggaaaggacccgtaaagtgataatgattatcatctacatatcacaacgtgcgtggaggccatcaaaccacgtcaaataatcaattatgacgcaggtatcgtattaattgatctgcatcaacttaacgtaaaaacaacttcagacaatacaaatcagcgacactgaatacggggcaacctcatgtcccccccccccccccccctgcaggcatcgtggtgtcacgctcgtcgtttggtatggcttcattcagctccggttcccaacgatcaaggcgagttacatgatcccccatgttgtgcaaaaaagcggttagctccttcggtcctccgatcgttgtcagaagtaagttggccgcagtgttatcactcatggttatggcagcactgcataattctcttactgtcatgccatccgtaagatgcttttctgtgactggtgagtactcaaccaagtcattctgagaatagtgtatgcggcgaccgagttgctcttgcccggcgtcaacacgggataataccgcgccacatagcagaactttaaaagtgctcatcattggaaaacgttcttcggggcgaaaactctcaaggatcttaccgctgttgagatccagttcgatgtaacccactcgtgcacccaactgatcttcagcatcttttactttcaccagcgtttctgggtgagcaaaaacaggaaggcaaaatgccgcaaaaaagggaataagggcgacacggaaatgttgaatactcatactcttcctttttcaatattattgaagcatttatcagggttattgtctcatgagcggatacatatttgaatgtatttagaaaaataaacaaataggggttccgcgcacatttccccgaaaagtgccacctgacgtctaagaaaccattattatcatgacattaacctataaaaataggcgtatcacgaggccctttcgtcttcaagaattcggagcttttgccattctcaccggattcagtcgtcactcatggtgatttctcacttgataaccttatttttgacgaggggaaattaataggttgtattgatgttggacgagtcggaatcgcagaccgataccaggatcttgccatcctatggaactgcctcggtgagttttctccttcattacagaaacggctttttcaaaaatatggtattgataatcctgatatgaataaattgcagtttcatttgatgctcgatgagtttttctaatcagaattggttaattggttgtaacactggcagagcattacgctgacttgacgggacggcggctttgttgaataaatcgaacttttgctgagttgaaggatcagatcacgcatcttcccgacaacgcagaccgttccgtggcaaagcaaaagttcaaaatcaccaactggtccacctacaacaaagctctcatcaaccgtggctccctcactttctggctggatgatggggcgattcaggcctggtatgagtcagcaacaccttcttcacgaggcagacctcagcgccagaaggccgccagagaggccgagcgcggccgtgaggcttggacgctagggcagggcatgaaaaagcccgtagcgggctgctacgggcgtctgacgcggtggaaagggggaggggatgttgtctacatggctctgctgtagtgagtgggttgcgctccggcagcggtcctgatcaatcgtcaccctttctcggtccttcaacgttcctgacaacgagcctccttttcgccaatccatcgacaatcaccgcgagtccctgctcgaacgctgcgtccggaccggcttcgtcgaaggcgtctatcgcggcccgcaacagcggcgagagcggagcctgttcaacggtgccgccgcgctcgccggcatcgctgtcgccggcctgctcctcaagcacggccccaacagtgaagtagctgattgtcatcagcgcattgacggcgtccccggccgaaaaacccgcctcgcagaggaagcgaagctgcgcgtcggccgtttccatctgcggtgcgcccggtcgcgtgccggcatggatgcgcgcgccatcgcggtaggcgagcagcgcctgcctgaagctgcgggcattcccgatcagaaatgagcgccagtcgtcgtcggctctcggcaccgaatgcgtatgattctccgccagcatggcttcggccagtgcgtcgagcagcgcccgcttgttcctgaagtgccagtaaagcgccggctgctgaacccccaaccgttccgccagtttgcgtgtcgtcagaccgtctacgccgacctcgttcaacaggtccagggcggcacggatcactgtattcggctgcaactttgtcatgcttgacactttatcactgataaacataatatgtccaccaacttatcagtgataaagaatccgcgcgttcaatcggaccagcggaggctggtccggaggccagacgtgaaacccaacatacccctgatcgtaattctgagcactgtcgcgctcgacgctgtcggcatcggcctgattatgccggtgctgccgggcctcctgcgcgatctggttcactcgaacgacgtcaccgcccactatggcattctgctggcgctgtatgcgttggtgcaatttgcctgcgcacctgtgctgggcgcgctgtcggatcgtttcgggcggcggccaatcttgctcgtctcgctggccggcgccactgtcgactacgccatcatggcgacagcgcctttcctttgggttctctatatcgggcggatcgtggccggcatcaccggggcgactggggcggtagccggcgcttatattgccgatatcactgatggcgatgagcgcgcgcggcacttcggcttcatgagcgcctgtttcgggttcgggatggtcgcgggacctgtgctcggtgggctgatgggcggtttctccccccacgctccgttcttcgccgcggcagccttgaacggcctcaatttcctgacgggctgtttccttttgccggagtcgcacaaaggcgaacgccggccgttacgccgggaggctctcaacccgctcgcttcgttccggtgggcccggggcatgaccgtcgtcgccgccctgatggcggtcttcttcatcatgcaacttgtcggacaggtgccggccgcgctttgggtcattttcggcgaggatcgctttcactgggacgcgaccacgatcggcatttcgcttgccgcatttggcattctgcattcactcgcccaggcaatgatcaccggccctgtagccgcccggctcggcgaaaggcgggcactcatgctcggaatgattgccgacggcacaggctacatcctgcttgccttcgcgacacggggatggatggcgttcccgatcatggtcctgcttgcttcgggtggcatcggaatgccggcgctgcaagcaatgttgtccaggcaggtggatgaggaacgtcaggggcagctgcaaggctcactggcggcgctcaccagcctgacctcgatcgtcggacccctcctcttcacggcgatctatgcggcttctataacaacgtggaacgggtgggcatggattgcaggcgctgccctctacttgctctgcctgccggcgctgcgtcgcgggctttggagcggcgcagggcaacgagccgatcgctgatcgtggaaacgataggcctatgccatgcgggtcaaggcgacttccggcaagctatacgcgccctaggagtgcggttggaacgttggcccagccagatactcccgatcacgagcaggacgccgatgatttgaagcgcactcagcgtctgatccaagaacaaccatcctagcaacacggcggtccccgggctgagaaagcccagtaaggaaacaactgtaggttcgagtcgcgagatcccccggaaccaaaggaagtaggttaaacccgctccgatcaggccgagccacgccaggccgagaacattggttcctgtaggcatcgggattggcggatcaaacactaaagctactggaacgagcagaagtcctccggccgccagttgccaggcggtaaaggtgagcagaggcacgggaggttgccacttgcgggtcagcacggttccgaacgccatggaaaccgcccccgccaggcccgctgcgacgccgacaggatctagcgctgcgtttggtgtcaacaccaacagcgccacgcccgcagttccgcaaatagcccccaggaccgccatcaatcgtatcgggctacctagcagagcggcagagatgaacacgaccatcagcggctgcacagcgcctaccgtcgccgcgaccccgcccggcaggcggtagaccgaaataaacaacaagctccagaatagcgaaatattaagtgcgccgaggatgaagatgcgcatccaccagattcccgttggaatctgtcggacgatcatcacgagcaataaacccgccggcaacgcccgcagcagcataccggcgacccctcggcctcgctgttcgggctccacgaaaacgccggacagatgcgccttgtgagcgtccttggggccgtcctcctgtttgaagaccgacagcccaatgatctcgccgtcgatgtaggcgccgaatgccacggcatctcgcaaccgttcagcgaacgcctccatgggctttttctcctcgtgctcgtaaacggacccgaacatctctggagctttcttcagggccgacaatcggatctcgcggaaatcctgcacgtcggccgctccaagccgtcgaatctgagccttaatcacaattgtcaattttaatcctctgtttatcggcagttcgtagagcgcgccgtgcgtcccgagcgatactgagcgaagcaagtgcgtcgagcagtgcccgcttgttcctgaaatgccagtaaagcgctggctgctgaacccccagccggaactgaccccacaaggccctagcgtttgcaatgcaccaggtcatcattgacccaggcgtgttccaccaggccgctgcctcgcaactcttcgcaggcttcgccgacctgctcgcgccacttcttcacgcgggtggaatccgatccgcacatgaggcggaaggtttccagcttgagcgggtacggctcccggtgcgagctgaaatagtcgaacatccgtcgggccgtcggcgacagcttgcggtacttctcccatatgaatttcgtgtagtggtcgccagcaaacagcacgacgatttcctcgtcgatcaggacctggcaacgggacgttttcttgccacggtccaggacgcggaagcggtgcagcagcgacaccgattccaggtgcccaacgcggtcggacgtgaagcccatcgccgtcgcctgtaggcgcgacaggcattcctcggccttcgtgtaataccggccattgatcgaccagcccaggtcctggcaaagctcgtagaacgtgaaggtgatcggctcgccgataggggtgcgcttcgcgtactccaacacctgctgccacaccagttcgtcatcgtcggcccgcagctcgacgccggtgtaggtgatcttcacgtccttgttgacgtggaaaatgaccttgttttgcagcgcctcgcgcgggattttcttgttgcgcgtggtgaacagggcagagcgggccgtgtcgtttggcatcgctcgcatcgtgtccggccacggcgcaatatcgaacaaggaaagctgcatttccttgatctgctgcttcgtgtgtttcagcaacgcggcctgcttggcctcgctgacctgttttgccaggtcctcgccggcggtttttcgcttcttggtcgtcatagttcctcgcgtgtcgatggtcatcgacttcgccaaacctgccgcctcctgttcgagacgacgcgaacgctccacggcggccgatggcgcgggcagggcagggggagccagttgcacgctgtcgcgctcgatcttggccgtagcttgctggaccatcgagccgacggactggaaggtttcgcggggcgcacgcatgacggtgcggcttgcgatggtttcggcatcctcggcggaaaaccccgcgtcgatcagttcttgcctgtatgccttccggtcaaacgtccgattcattcaccctccttgcgggattgccccgactcacgccggggcaatgtgcccttattcctgatttgacccgcctggtgccttggtgtccagataatccaccttatcggcaatgaagtcggtcccgtagaccgtctggccgtccttctcgtacttggtattccgaatcttgccctgcacgaataccagcgaccccttgcccaaatacttgccgtgggcctcggcctgagagccaaaacacttgatgcggaagaagtcggtgcgctcctgcttgtcgccggcatcgttgcgccactcttcattaaccgctatatcgaaaattgcttgcggcttgttagaattgccatgacgtacctcggtgtcacgggtaagattaccgataaactggaactgattatggctcatatcgaaagtctccttgagaaaggagactctagtttagctaaacattggttccgctgtcaagaactttagcggctaaaattttgcgggccgcgaccaaaggtgcgaggggcggcttccgctgtgtacaaccagatatttttcaccaacatccttcgtctgctcgatgagcggggcatgacgaaacatgagctgtcggagagggcaggggtttcaatttcgtttttatcagacttaaccaacggtaaggccaacccctcgttgaaggtgatggaggccattgccgacgccctggaaactcccctacctcttctcctggagtccaccgaccttgaccgcgaggcactcgcggagattgcgggtcatcctttcaagagcagcgtgccgcccggatacgaacgcatcagtgtggttttgccgtcacataaggcgtttatcgtaaagaaatggggcgacgacacccgaaaaaagctgcgtggaaggctctgacgccaagggttagggcttgcacttccttctttagccgctaaaacggccccttctctgcgggccgtcggctcgcgcatcatatcgacatcctcaacggaagccgtgccgcgaatggcatcgggcgggtgcgctttgacagttgttttctatcagaacccctacgtcgtgcggttcgattagctgtttgtcttgcaggctaaacactttcggtatatcgtttgcctgtgcgataatgttgctaatgatttgttgcgtaggggttactgaaaagtgagcgggaaagaagagtttcagaccatcaaggagcgggccaagcgcaagctggaacgcgacatgggtgcggacctgttggccgcgctcaacgacccgaaaaccgttgaagtcatgctcaacgcggacggcaaggtgtggcacgaacgccttggcgagccgatgcggtacatctgcgacatgcggcccagccagtcgcaggcgattatagaaacggtggccggattccacggcaaagaggtcacgcggcattcgcccatcctggaaggcgagttccccttggatggcagccgctttgccggccaattgccgccggtcgtggccgcgccaacctttgcgatccgcaagcgcgcggtcgccatcttcacgctggaacagtacgtcgaggcgggcatcatgacccgcgagcaatacgaggtcattaaaagcgccgtcgcggcgcatcgaaacatcctcgtcattggcggtactggctcgggcaagaccacgctcgtcaacgcgatcatcaatgaaatggtcgccttcaacccgtctgagcgcgtcgtcatcatcgaggacaccggcgaaatccagtgcgccgcagagaacgccgtccaataccacaccagcatcgacgtctcgatgacgctgctgctcaagacaacgctgcgtatgcgccccgaccgcatcctggtcggtgaggtacgtggccccgaagcccttgatctgttgatggcctggaacaccgggcatgaaggaggtgccgccaccctgcacgcaaacaaccccaaagcgggcctgagccggctcgccatgcttatcagcatgcacccggattcaccgaaacccattgagccgctgattggcgaggcggttcatgtggtcgtccatatcgccaggacccctagcggccgtcgagtgcaagaaattctcgaagttcttggttacgagaacggccagtacatcaccaaaaccctgtaaggagtatttccaatgacaacggctgttccgttccgtctgaccatgaatcgcggcattttgttctaccttgccgtgttcttcgttctcgctctcgcgttatccgcgcatccggcgatggcctcggaaggcaccggcggcagcttgccatatgagagctggctgacgaacctgcgcaactccgtaaccggcccggtggccttcgcgctgtccatcatcggcatcgtcgtcgccggcggcgtgctgatcttcggcggcgaactcaacgccttcttccgaaccctgatcttcctggttctggtgatggcgctgctggtcggcgcgcagaacgtgatgagcaccttcttcggtcgtggtgccgaaatcgcggccctcggcaacggggcgctgcaccaggtgcaagtcgcggcggcggatgccgtgcgtgcggtagcggctggacggctcgcctaatcatggctctgcgcacgatccccatccgtcgcgcaggcaaccgagaaaacctgttcatgggtggtgatcgtgaactggtgatgttctcgggcctgatggcgtttgcgctgattttcagcgcccaagagctgcgggccaccgtggtcggtctgatcctgtggttcggggcgctctatgcgttccgaatcatggcgaaggccgatccgaagatgcggttcgtgtacctgcgtcaccgccggtacaagccgtattacccggcccgctcgaccccgttccgcgagaacaccaatagccaagggaagcaataccgatgatccaagcaattgcgattgcaatcgcgggcctcggcgcgcttctgttgttcatcctctttgcccgcatccgcgcggtcgatgccgaactgaaactgaaaaagcatcgttccaaggacgccggcctggccgatctgctcaactacgccgctgtcgtcgatgacggcgtaatcgtgggcaagaacggcagctttatggctgcctggctgtacaagggcgatgacaacgcaagcagcaccgaccagcagcgcgaagtagtgtccgcccgcatcaaccaggccctcgcgggcctgggaagtgggtggatgatccatgtggacgccgtgcggcgtcctgctccgaactacgcggagcggggcctgtcggcgttccctgaccgtctgacggcagcgattgaagaagagcgctcggtcttgccttgctcgtcggtgatgtacttcaccagctccgcgaagtcgctcttcttgatggagcgcatggggacgtgcttggcaatcacgcgcaccccccggccgttttagcggctaaaaaagtcatggctctgccctcgggcggaccacgcccatcatgaccttgccaagctcgtcctgcttctcttcgatcttcgccagcagggcgaggatcgtggcatcaccgaaccgcgccgtgcgcgggtcgtcggtgagccagagtttcagcaggccgcccaggcggcccaggtcgccattgatgcgggccagctcgcggacgtgctcatagtccacgacgcccgtgattttgtagccctggccgacggccagcaggtaggccgacaggctcatgccggccgccgccgccttttcctcaatcgctcttcgttcgtctggaaggcagtacaccttgataggtgggctgcccttcctggttggcttggtttcatcagccatccgcttgccctcatctgttacgccggcggtagccggccagcctcgcagagcaggattcccgttgagcaccgccaggtgcgaataagggacagtgaagaaggaacacccgctcgcgggtgggcctacttcacctatcctgcccggctgacgccgttggatacaccaaggaaagtctacacgaaccctttggcaaaatcctgtatatcgtgcgaaaaaggatggatataccgaaaaaatcgctataatgaccccgaagcagggttatgcagcggaaaagcgctgcttccctgctgttttgtggaatatctaccgactggaaacaggcaaatgcaggaaattactgaactgaggggacaggcgagagacgatgccaaagagctacaccgacgagctggccgagtgggttgaatcccgcgcggccaagaagcgccggcgtgatgaggctgcggttgcgttcctggcggtgagggcggatgtcgaggcggcgttagcgtccggctatgcgctcgtcaccatttgggagcacatgcgggaaacggggaaggtcaagttctcctacgagacgttccgctcgcacgccaggcggcacatcaaggccaagcccgccgatgtgcccgcaccgcaggccaaggctgcggaacccgcgccggcacccaagacgccggagccacggcggccgaagcaggggggcaaggctgaaaagccggcccccgctgcggccccgaccggcttcaccttcaacccaacaccggacaaaaaggatctactgtaatggcgaaaattcacatggttttgcagggcaagggcggggtcggcaagtcggccatcgccgcgatcattgcgcagtacaagatggacaaggggcagacacccttgtgcatcgacaccgacccggtgaacgcgacgttcgagggctacaaggccctgaacgtccgccggctgaacatcatggccggcgacgaaattaactcgcgcaacttcgacaccctggtcgagctgattgcgccgaccaaggatgacgtggtgatcgacaacggtgccagctcgttcgtgcctctgtcgcattacctcatcagcaaccaggtgccggctctgctgcaagaaatggggcatgagctggtcatccataccgtcgtcaccggcggccaggctctcctggacacggtgagcggcttcgcccagctcgccagccagttcccggccgaagcgcttttcgtggtctggctgaacccgtattgggggcctatcgagcatgagggcaagagctttgagcagatgaaggcgtacacggccaacaaggcccgcgtgtcgtccatcatccagattccggccctcaaggaagaaacctacggccgcgatttcagcgacatgctgcaagagcggctgacgttcgaccaggcgctggccgatgaatcgctcacgatcatgacgcggcaacgcctcaagatcgtgcggcgcggcctgtttgaacagctcgacgcggcggccgtgctatgagcgaccagattgaagagctgatccgggagattgcggccaagcacggcatcgccgtcggccgcgacgacccggtgctgatcctgcataccatcaacgcccggctcatggccgacagtgcggccaagcaagaggaaatccttgccgcgttcaaggaagagctggaagggatcgcccatcgttggggcgaggacgccaaggccaaagcggagcggatgctgaacgcggccctggcggccagcaaggacgcaatggcgaaggtaatgaaggacagcgccgcgcaggcggccgaagcgatccgcagggaaatcgacgacggccttggccgccagctcgcggccaaggtcgcggacgcgcggcgcgtggcgatgatgaacatgatcgccggcggcatggtgttgttcgcggccgccctggtggtgtgggcctcgttatgaatcgcagaggcgcagatgaaaaagcccggcgttgccgggctttgtttttgcgttagctgggcttgtttgacaggcccaagctctgactgcgcccgcgctcgcgctcctgggcctgtttcttctcctgctcctgcttgcgcatcagggcctggtgccgtcgggctgcttcacgcatcgaatcccagtcgccggccagctcgggatgctccgcgcgcatcttgcgcgtcgccagttcctcgatcttgggcgcgtgaatgcccatgccttccttgatttcgcgcaccatgtccagccgcgtgtgcagggtctgcaagcgggcttgctgttgggcctgctgctgctgccaggcggcctttgtacgcggcagggacagcaagccgggggcattggactgtagctgctgcaaacgcgcctgctgacggtctacgagctgttctaggcggtcctcgatgcgctccacctggtcatgctttgcctgcacgtagagcgcaagggtctgctggtaggtctgctcgatgggcgcggattctaagagggcctgctgttccgtctcggcctcctgggccgcctgtagcaaatcctcgccgctgttgccgctggactgctttactgccggggactgctgttgccctgctcgcgccgtcgtcgcagttcggcttgcccccactcgattgactgcttcatttcgagccgcagcgatgcgatctcggattgcgtcaacggacggggcagcgcggaggtgtccggcttctccttgggtgagtcggtcgatgccatagccaaaggtttccttccaaaatgcgtccattgctggaccgtgtttctcattgatgcccgcaagcatcttcggcttgaccgccaggtcaagcgcgccttcatgggcggtcatgacggacgccgccatgaccttgccgccgttgttctcgatgtagccgcgtaatgaggcaatggtgccgcccatcgtcagcgtgtcatcgacaacgatgtacttctggccggggatcacctccccctcgaaagtcgggttgaacgccaggcgatgatctgaaccggctccggttcgggcgaccttctcccgctgcacaatgtccgtttcgacctcaaggccaaggcggtcggccagaacgaccgccatcatggccggaatcttgttgttccccgccgcctcgacggcgaggactggaacgatgcggggcttgtcgtcgccgatcagcgtcttgagctgggcaacagtgtcgtccgaaatcaggcgctcgaccaaattaagcgccgcttccgcgtcgccctgcttcgcagcctggtattcaggctcgttggtcaaagaaccaaggtcgccgttgcgaaccaccttcgggaagtctccccacggtgcgcgctcggctctgctgtagctgctcaagacgcctccctttttagccgctaaaactctaacgagtgcgcccgcgactcaacttgacgctttcggcacttacctgtgccttgccacttgcgtcataggtgatgcttttcgcactcccgatttcaggtactttatcgaaatctgaccgggcgtgcattacaaagttcttccccacctgttggtaaatgctgccgctatctgcgtggacgatgctgccgtcgtggcgctgcgacttatcggccttttgggccatatagatgttgtaaatgccaggtttcagggccccggctttatctaccttctggttcgtccatgcgccttggttctcggtctggacaattctttgcccattcatgaccaggaggcggtgtttcattgggtgactcctgacggttgcctctggtgttaaacgtgtcctggtcgcttgccggctaaaaaaaagccgacctcggcagttcgaggccggctttccctagagccgggcgcgtcaaggttgttccatctattttagtgaactgcgttcgatttatcagttactttcctcccgctttgtgtttcctcccactcgtttccgcgtctagccgacccctcaacatagcggcctcttcttgggctgcctttgcctcttgccgcgcttcgtcacgctcggcttgcaccgtcgtaaagcgctcggcctgcctggccgcctcttgcgccgccaacttcctttgctcctggtgggcctcggcgtcggcctgcgccttcgctttcaccgctgccaactccgtgcgcaaactctccgcttcgcgcctggtggcgtcgcgctcgccgcgaagcgcctgcatttcctggttggccgcgtccagggtcttgcggctctcttctttgaatgcgcgggcgtcctggtgagcgtagtccagctcggcgcgcagctcctgcgctcgacgctccacctcgtcggcccgctgcgtcgccagcgcggcccgctgctcggctcctgccagggcggtgcgtgcttcggccagggcttgccgctggcgtgcggccagctcggccgcctcggcggcctgctgctctagcaatgtaacgcgcgcctgggcttcttccagctcgcgggcctgcgcctcgaaggcgtcggccagctccccgcgcacggcttccaactcgttgcgctcacgatcccagccggcttgcgctgcctgcaacgattcattggcaagggcctgggcggcttgccagagggcggccacggcctggttgccggcctgctgcaccgcgtccggcacctggactgccagcggggcggcctgcgccgtgcgctggcgtcgccattcgcgcatgccggcgctggcgtcgttcatgttgacgcgggcggccttacgcactgcatccacggtcgggaagttctcccggtcgccttgctcgaacagctcgtccgcagccgcaaaaatgcggtcgcgcgtctctttgttcagttccatgttggctccggtaattggtaagaataataatactcttacctaccttatcagcgcaagagtttagctgaacagttctcgacttaacggcaggttttttagcggctgaagggcaggcaaaaaaagccccgcacggtcggcgggggcaaagggtcagcgggaaggggattagcgggcgtcgggcttcttcatgcgtcggggccgcgcttcttgggatggagcacgacgaagcgcgcacgcgcatcgtcctcggccctatcggcccgcgtcgcggtcaggaacttgtcgcgcgctaggtcctccctggtgggcaccaggggcatgaactcggcctgctcgatgtaggtccactccatgaccgcatcgcagtcgaggccgcgttccttcaccgtctcttgcaggtcgcggtacgcccgctcgttgagcggctggtaacgggccaattggtcgtaaatggctgtcggccatgagcggcctttcctgttgagccagcagccgacgacgaagccggcaatgcaggcccctggcacaaccaggccgacgccgggggcaggggatggcagcagctcgccaaccaggaaccccgccgcgatgatgccgatgccggtcaaccagcccttgaaactatccggccccgaaacacccctgcgcattgcctggatgctgcgccggatagcttgcaacatcaggagccgtttcttttgttcgtcagtcatggtccgccctcaccagttgttcgtatcggtgtcggacgaactgaaatcgcaagagctgccggtatcggtccagccgctgtccgtgtcgctgctgccgaagcacggcgaggggtccgcgaacgccgcagacggcgtatccggccgcagcgcatcgcccagcatggccccggtcagcgagccgccggccaggtagcccagcatggtgctgttggtcgccccggccaccagggccgacgtgacgaaatcgccgtcattccctctggattgttcgctgctcggcggggcagtgcgccgcgccggcggcgtcgtggatggctcgggttggctggcctgcgacggccggcgaaaggtgcgcagcagctcgttatcgaccggctgcggcgtcggggccgccgccttgcgctgcggtcggtgttccttcttcggctcgcgcagcttgaacagcatgatcgcggaaaccagcagcaacgccgcgcctacgcctcccgcgatgtagaacagcatcggattcattcttcggtcctccttgtagcggaaccgttgtctgtgcggcgcgggtggcccgcgccgctgtctttggggatcagccctcgatgagcgcgaccagtttcacgtcggcaaggttcgcctcgaactcctggccgtcgtcctcgtacttcaaccaggcatagccttccgccggcggccgacggttgaggataaggcgggcagggcgctcgtcgtgctcgacctggacgatggcctttttcagcttgtccgggtccggctccttcgcgcccttttccttggcgtccttaccgtcctggtcgccgtcctcgccgtcctggccgtcgccggcctccgcgtcacgctcggcatcagtctggccgttgaaggcatcgacggtgttgggatcgcggcccttctcgtccaggaactcgcgcagcagcttgaccgtgccgcgcgtgatttcctgggtgtcgtcgtcaagccacgcctcgacttcctccgggcgcttcttgaaggccgtcaccagctcgttcaccacggtcacgtcgcgcacgcggccggtgttgaacgcatcggcgatcttctccggcaggtccagcagcgtgacgtgctgggtgatgaacgccggcgacttgccgatttccttggcgatatcgcctttcttcttgcccttcgccagctcgcggccaatgaagtcggcaatttcgcgcggggtcagctcgttgcgttgcaggttctcgataacctggtcggcttcgttgtagtcgttgtcgatgaacgccgggatggacttcttgccggcccacttcgagccacggtagcggcgggcgccgtgattgatgatatagcggcccggctgctcctggttctcgcgcaccgaaatgggtgacttcaccccgcgctctttgatcgtggcaccgatttccgcgatgctctccggggaaaagccggggttgtcggccgtccgcggctgatgcggatcttcgtcgatcaggtccaggtccagctcgatagggccggaaccgccctgagacgccgcaggagcgtccaggaggctcgacaggtcgccgatgctatccaaccccaggccggacggctgcgccgcgcctgcggcttcctgagcggccgcagcggtgtttttcttggtggtcttggcttgagccgcagtcattgggaaatctccatcttcgtgaacacgtaatcagccagggcgcgaacctctttcgatgccttgcgcgcggccgttttcttgatcttccagaccggcacaccggatgcgagggcatcggcgatgctgctgcgcaggccaacggtggccggaatcatcatcttggggtacgcggccagcagctcggcttggtggcgcgcgtggcgcggattccgcgcatcgaccttgctgggcaccatgccaaggaattgcagcttggcgttcttctggcgcacgttcgcaatggtcgtgaccatcttcttgatgccctggatgctgtacgcctcaagctcgatgggggacagcacatagtcggccgcgaagagggcggccgccaggccgacgccaagggtcggggccgtgtcgatcaggcacacgtcgaagccttggttcgccagggccttgatgttcgccccgaacagctcgcgggcgtcgtccagcgacagccgttcggcgttcgccagtaccgggttggactcgatgagggcgaggcgcgcggcctggccgtcgccggctgcgggtgcggtttcggtccagccgccggcagggacagcgccgaacagcttgcttgcatgcaggccggtagcaaagtccttgagcgtgtaggacgcattgccctgggggtccaggtcgatcacggcaacccgcaagccgcgctcgaaaaagtcgaaggcaagatgcacaagggtcgaagtcttgccgacgccgcctttctggttggccgtgaccaaagttttcatcgtttggtttcctgttttttcttggcgtccgcttcccacttccggacgatgtacgcctgatgttccggcagaaccgccgttacccgcgcgtacccctcgggcaagttcttgtcctcgaacgcggcccacacgcgatgcaccgcttgcgacactgcgcccctggtcagtcccagcgacgttgcgaacgtcgcctgtggcttcccatcgactaagacgccccgcgctatctcgatggtctgctgccccacttccagcccctggatcgcctcctggaactggctttcggtaagccgtttcttcatggataacacccataatttgctccgcgccttggttgaacatagcggtgacagccgccagcacatgagagaagtttagctaaacatttctcgcacgtcaacacctttagccgctaaaactcgtccttggcgtaacaaaacaaaagcccggaaaccgggctttcgtctcttgccgcttatggctctgcacccggctccatcaccaacaggtcgcgcacgcgcttcactcggttgcggatcgacactgccagcccaacaaagccggttgccgccgccgccaggatcgcgccgatgatgccggccacaccggccatcgcccaccaggtcgccgccttccggttccattcctgctggtactgcttcgcaatgctggacctcggctcaccataggctgaccgctcgatggcgtatgccgcttctccccttggcgtaaaacccagcgccgcaggcggcattgccatgctgcccgccgctttcccgaccacgacgcgcgcaccaggcttgcggtccagaccttcggccacggcgagctgcgcaaggacataatcagccgccgacttggctccacgcgcctcgatcagctcttgcactcgcgcgaaatccttggcctccacggccgccatgaatcgcgcacgcggcgaaggctccgcagggccggcgtcgtgatcgccgccgagaatgcccttcaccaagttcgacgacacgaaaatcatgctgacggctatcaccatcatgcagacggatcgcacgaacccgctgaattgaacacgagcacggcacccgcgaccactatgccaagaatgcccaaggtaaaaattgccggccccgccatgaagtccgtgaatgccccgacggccgaagtgaagggcaggccgccacccaggccgccgccctcactgcccggcacctggtcgctgaatgtcgatgccagcacctgcggcacgtcaatgcttccgggcgtcgcgctcgggctgatcgcccatcccgttactgccccgatcccggcaatggcaaggactgccagcgctgccatttttggggtgaggccgttcgcggccgaggggcgcagcccctggggggatgggaggcccgcgttagcgggccgggagggttcgagaagggggggcaccccccttcggcgtgcgcggtcacgcgcacagggcgcagccctggttaaaaacaaggtttataaatattggtttaaaagcaggttaaaagacaggttagcggtggccgaaaaacgggcggaaacccttgcaaatgctggattttctgcctgtggacagcccctcaaatgtcaataggtgcgcccctcatctgtcagcactctgcccctcaagtgtcaaggatcgcgcccctcatctgtcagtagtcgcgcccctcaagtgtcaataccgcagggcacttatccccaggcttgtccacatcatctgtgggaaactcgcgtaaaatcaggcgttttcgccgatttgcgaggctggccagctccacgtcgccggccgaaatcgagcctgcccctcatctgtcaacgccgcgccgggtgagtcggcccctcaagtgtcaacgtccgcccctcatctgtcagtgagggccaagttttccgcgaggtatccacaacgccggcggccgcggtgtctcgcacacggcttcgacggcgtttctggcgcgtttgcagggccatagacggccgccagcccagcggcgagggcaaccagcccggtgagcgtcggaaaggcgctggaagccccgtagcgacgcggagaggggcgagacaagccaagggcgcaggctcgatgcgcagcacgacatagccggttctcgcaaggacgagaatttccctgcggtgcccctcaagtgtcaatgaaagtttccaacgcgagccattcgcgagagccttgagtccacgctagatgagagctttgttgtaggtggaccagttggtgattttgaacttttgctttgccacggaacggtctgcgttgtcgggaagatgcgtgatctgatccttcaactcagcaaaagttcgatttattcaacaaagccacgttgtgtctcaaaatctctgatgttacattgcacaagataaaaatatatcatcatgaacaataaaactgtctgcttacataaacagtaatacaaggggtgttatgagccatattcaacgggaaacgtcttgctcgactctagagctcgttcctcgaggcctcgaggcctcgaggaacggtacctgcggggaagcttacaataatgtgtgttgttaagtcttgttgcctgtcatcgtctgactgactttcgtcataaatcccggcctccgtaacccagctttgggcaagctcacggatttgatccggcggaacgggaatatcgagatgccgggctgaacgctgcagttccagctttccctttcgggacaggtactccagctgattgattatctgctgaagggtcttggttccacctcctggcacaatgcgaatgattacttgagcgcgatcgggcatccaattttctcccgtcaggtgcgtggtcaagtgctacaaggcacctttcagtaacgagcgaccgtcgatccgtcgccgggatacggacaaaatggagcgcagtagtccatcgagggcggcgaaagcctcgccaaaagcaatacgttcatctcgcacagcctccagatccgatcgagggtcttcggcgtaggcagatagaagcatggatacattgcttgagagtattccgatggactgaagtatggcttccatcttttctcgtgtgtctgcatctatttcgagaaagcccccgatgcggcgcaccgcaacgcgaattgccatactatccgaaagtcccagcaggcgcgcttgataggaaaaggtttcatactcggccgatcgcagacgggcactcacgaccttgaacccttcaactttcagggatcgatgctggttgatggtagtctcactcgacgtggctctggtgtgttttgacatagcttcctccaaagaaagcggaaggtctggatactccagcacgaaatgtgcccgggtagacggatggaagtctagccctgctcaatatgaaatcaacagtacatttacagtcaatactgaatatacttgctacatttgcaattgtcttataacgaatgtgaaataaaaatagtgtaacaacgcttttactcatcgataatcacaaaaacatttatacgaacaaaaatacaaatgcactccggtttcacaggataggcgggatcagaatatgcaacttttgacgttttgttctttcaaagggggtgctggcaaaaccaccgcactcatgggcctttgcgctgctttggcaaatgacggtaaacgagtggccctctttgatgccgacgaaaaccggcctctgacgcgatggagagaaaacgccttacaaagcagtactgggatcctcgctgtgaagtctattccgccgacgaaatgccccttcttgaagcagcctatgaaaatgccgagctcgaaggatttgattatgcgttggccgatacgcgtggcggctcgagcgagctcaacaacacaatcatcgctagctcaaacctgcttctgatccccaccatgctaacgccgctcgacatcgatgaggcactatctacctaccgctacgtcatcgagctgctgttgagtgaaaatttggcaattcctacagctgttttgcgccaacgcgtcccggtcggccgattgacaacatcgcaacgcaggatgtcagagacgctagagagccttccagttgtaccgtctcccatgcatgaaagagatgcatttgccgcgatgaaagaacgcggcatgttgcatcttacattactaaacacgggaactgatccgacgatgcgcctcatagagaggaatcttcggattgcgatggaggaagtcgtggtcatttcgaaactgatcagcaaaatcttggaggcttgaagatggcaattcgcaagcccgcattgtcggtcggcgaagcacggcggcttgctggtgctcgacccgagatccaccatcccaacccgacacttgttccccagaagctggacctccagcacttgcctgaaaaagccgacgagaaagaccagcaacgtgagcctctcgtcgccgatcacatttacagtcccgatcgacaacttaagctaactgtggatgcccttagtccacctccgtccccgaaaaagctccaggtttttctttcagcgcgaccgcccgcgcctcaagtgtcgaaaacatatgacaacctcgttcggcaatacagtccctcgaagtcgctacaaatgattttaaggcgcgcgttggacgatttcgaaagcatgctggcagatggatcatttcgcgtggccccgaaaagttatccgatcccttcaactacagaaaaatccgttctcgttcagacctcacgcatgttcccggttgcgttgctcgaggtcgctcgaagtcattttgatccgttggggttggagaccgctcgagctttcggccacaagctggctaccgccgcgctcgcgtcattctttgctggagagaagccatcgagcaattggtgaagagggacctatcggaacccctcaccaaatattgagtgtaggtttgaggccgctggccgcgtcctcagtcaccttttgagccagataattaagagccaaatgcaattggctcaggctgccatcgtccccccgtgcgaaacctgcacgtccgcgtcaaagaaataaccggcacctcttgctgtttttatcagttgagggcttgacggatccgcctcaagtttgcggcgcagccgcaaaatgagaacatctatactcctgtcgtaaacctcctcgtcgcgtactcgactggcaatgagaagttgctcgcgcgatagaacgtcgcggggtttctctaaaaacgcgaggagaagattgaactcacctgccgtaagtttcacctcaccgccagcttcggacatcaagcgacgttgcctgagattaagtgtccagtcagtaaaacaaaaagaccgtcggtctttggagcggacaacgttggggcgcacgcgcaaggcaacccgaatgcgtgcaagaaactctctcgtactaaacggcttagcgataaaatcacttgctcctagctcgagtgcaacaactttatccgtctcctcaaggcggtcgccactgataattatgattggaatatcagactttgccgccagatttcgaacgatctcaagcccatcttcacgacctaaatttagatcaacaaccacgacatcgaccgtcgcggaagagagtactctagtgaactgggtgctgtcggctaccgcggtcactttgaaggcgtggatcgtaaggtattcgataataagatgccgcatagcgacatcgtcatcgataagaagaacgtgtttcaacggctcacctttcaatctaaaatctgaacccttgttcacagcgcttgagaaattttcacgtgaaggatgtacaatcatctccagctaaatgggcagttcgtcagaattgcggctgaccgcggatgacgaaaatgcgaaccaagtatttcaattttatgacaaaagttctcaatcgttgttacaagtgaaacgcttcgaggttacagctactattgattaaggagatcgcctatggtctcgccccggcgtcgtgcgtccgccgcgagccagatctcgcctacttcataaacgtcctcataggcacggaatggaatgatgacatcgatcgccgtagagagcatgtcaatcagtgtgcgatcttccaagctagcaccttgggcgctacttttgacaagggaaaacagtttcttgaatccttggattggattcgcgccgtgtattgttgaaatcgatcccggatgtcccgagacgacttcactcagataagcccatgctgcatcgtcgcgcatctcgccaagcaatatccggtccggccgcatacgcagacttgcttggagcaagtgctcggcgctcacagcacccagcccagcaccgttcttggagtagagtagtctaacatgattatcgtgtggaatgacgagttcgagcgtatcttctatggtgattagcctttcctggggggggatggcgctgatcaaggtcttgctcattgttgtcttgccgcttccggtagggccacatagcaacatcgtcagtcggctgacgacgcatgcgtgcagaaacgcttccaaatccccgttgtcaaaatgctgaaggatagcttcatcatcctgattttggcgtttccttcgtgtctgccactggttccacctcgaagcatcataacgggaggagacttctttaagaccagaaacacgcgagcttggccgtcgaatggtcaagctgacggtgcccgagggaacggtcggcggcagacagatttgtagtcgttcaccaccaggaagttcagtggcgcagagggggttacgtggtccgacatcctgctttctcagcgcgcccgctaaaatagcgatatcttcaagatcatcataagagacgggcaaaggcatcttggtaaaaatgccggcttggcgcacaaatgcctctccaggtcgattgatcgcaatttcttcagtcttcgggtcatcgagccattccaaaatcggcttcagaagaaagcgtagttgcggatccacttccatttacaatgtatcctatctctaagcggaaatttgaattcattaagagcggcggttcctcccccgcgtggcgccgccagtcaggcggagctggtaaacaccaaagaaatcgaggtcccgtgctacgaaaatggaaacggtgtcaccctgattcttcttcagggttggcggtatgttgatggttgccttaagggctgtctcagttgtctgctcaccgttattttgaaagctgttgaagctcatcccgccacccgagctgccggcgtaggtgctagctgcctggaaggcgccttgaacaacactcaagagcatagctccgctaaaacgctgccagaagtggctgtcgaccgagcccggcaatcctgagcgaccgagttcgtccgcgcttggcgatgttaacgagatcatcgcatggtcaggtgtctcggcgcgatcccacaacacaaaaacgcgcccatctccctgttgcaagccacgctgtatttcgccaacaacggtggtgccacgatcaagaagcacgatattgttcgttgttccacgaatatcctgaggcaagacacactttacatagcctgccaaatttgtgtcgattgcggtttgcaagatgcacggaattattgtcccttgcgttaccataaaatcggggtgcggcaagagcgtggcgctgctgggctgcagctcggtgggtttcatacgtatcgacaaatcgttctcgccggacacttcgccattcggcaaggagttgtcgtcacgcttgccttcttgtcttcggcccgtgtcgccctgaatggcgcgtttgctgaccccttgatcgccgctgctatatgcaaaaatcggtgtttcttccggccgtggctcatgccgctccggttcgcccctcggcggtagaggagcagcaggctgaacagcctcttgaaccgctggaggatccggcggcacctcaatcggagctggatgaaatggcttggtgtttgttgcgatcaaagttgacggcgatgcgttctcattcaccttcttttggcgcccacctagccaaatgaggcttaatgataacgcgagaacgacacctccgacgatcaatttctgagaccccgaaagacgccggcgatgtttgtcggagaccagggatccagatgcatcaacctcatgtgccgcttgctgactatcgttattcatcccttcgcccccttcaggacgcgtttcacatcgggcctcaccgtgcccgtttgcggcctttggccaacgggatcgtaagcggtgttccagatacatagtactgtgtggccatccctcagacgccaacctcgggaaaccgaagaaatctcgacatcgctccctttaactgaatagttggcaacagcttccttgccatcaggattgatggtgtagatggagggtatgcgtacattgcccggaaagtggaataccgtcgtaaatccattgtcgaagacttcgagtggcaacagcgaacgatcgccttgggcgacgtagtgccaattactgtccgccgcaccaagggctgtgacaggctgatccaataaattctcagctttccgttgatattgtgcttccgcgtgtagtctgtccacaacagccttctgttgtgcctcccttcgccgagccgccgcatcgtcggcggggtaggcgaattggacgctgtaatagagatcgggctgctctttatcgaggtgggacagagtcttggaacttatactgaaaacataacggcgcatcccggagtcgcttgcggttagcacgattactggctgaggcgtgaggacctggcttgccttgaaaaatagataatttccccgcggtagggctgctagatctttgctatttgaaacggcaaccgctgtcaccgtttcgttcgtggcgaatgttacgaccaaagtagctccaaccgccgtcgagaggcgcaccacttgatcgggattgtaagccaaataacgcatgcgcggatctagcttgcccgccattggagtgtcttcagcctccgcaccagtcgcagcggcaaataaacatgctaaaatgaaaagtgcttttctgatcatggttcgctgtggcctacgtttgaaacggtatcttccgatgtctgataggaggtgacaaccagacctgccgggttggttagtctcaatctgccgggcaagctggtcaccttttcgtagcgaactgtcgcggtccacgtactcaccacaggcattttgccgtcaacgacgagggtccttttatagcgaatttgctgcgtgcttggagttacatcatttgaagcgatgtgctcgacctccaccctgccgcgtttgccaagaatgacttgaggcgaactgggattgggatagttgaagaattgctggtaatcctggcgcactgttggggcactgaagttcgataccaggtcgtaggcgtactgagcggtgtcggcatcataactctcgcgcaggcgaacgtactcccacaatgaggcgttaacgacggcctcctcttgagttgcaggcaatcgcgagacagacacctcgctgtcaacggtgccgtccggccgtatccatagatatacgggcacaagcctgctcaacggcaccattgtggctatagcgaacgcttgagcaacatttcccaaaatcgcgatagctgcgacagctgcaatgagtttggagagacgtcgcgccgatttcgctcgcgcggtttgaaaggcttctacttccttatagtgctcggcaaggctttcgcgcgccactagcatggcatattcaggccccgtcatagcgtccacccgaattgccgagctgaagatctgacggagtaggctgccatcgccccacattcagcgggaagatcgggcctttgcagctcgctaatgtgtcgtttgtctggcagccgctcaaagcgacaactaggcacagcaggcaatacttcatagaattctccattgaggcgaatttttgcgcgacctagcctcgctcaacctgagcgaagcgacggtacaagctgctggcagattgggttgcgccgctccagtaactgcctccaatgttgccggcgatcgccggcaaagcgacaatgagcgcatcccctgtcagaaaaaacatatcgagttcgtaaagaccaatgatcttggccgcggtcgtaccggcgaaggtgattacaccaagcataagggtgagcgcagtcgcttcggttaggatgacgatcgttgccacgaggtttaagaggagaagcaagagaccgtaggtgataagttgcccgatccacttagctgcgatgtcccgcgtgcgatcaaaaatatatccgacgaggatcagaggcccgatcgcgagaagcactttcgtgagaattccaacggcgtcgtaaactccgaaggcagaccagagcgtgccgtaaaggacccactgtgccccttggaaagcaaggatgtcctggtcgttcatcggaccgatttcggatgcgattttctgaaaaacggcctgggtcacggcgaacattgtatccaactgtgccggaacagtctgcagaggcaagccggttacactaaactgctgaacaaagtttgggaccgtcttttcgaagatggaaaccacatagtcttggtagttagcctgcccaacaattagagcaacaacgatggtgaccgtgatcacccgagtgataccgctacgggtatcgacttcgccgcgtatgactaaaataccctgaacaataatccaaagagtgacacaggcgatcaatggcgcactcaccgcctcctggatagtctcaagcatcgagtccaagcctgtcgtgaaggctacatcgaagatcgtatgaatggccgtaaacggcgccggaatcgtgaaattcatcgattggacctgaacttgactggtttgtcgcataatgttggataaaatgagctcgcattcggcgaggatgcgggcggatgaacaaatcgcccagccttaggggagggcaccaaagatgacagcggtcttttgatgctccttgcgttgagcggccgcctcttccgcctcgtgaaggccggcctgcgcggtagtcatcgttaataggcttgtcgcctgtacattttgaatcattgcgtcatggatctgcttgagaagcaaaccattggtcacggttgcctgcatgatattgcgagatcgggaaagctgagcagacgtatcagcattcgccgtcaagcgtttgtccatcgtttccagattgtcagccgcaatgccagcgctgtttgcggaaccggtgatctgcgatcgcaacaggtccgcttcagcatcactacccacgactgcacgatctgtatcgctggtgatcgcacgtgccgtggtcgacattggcattcgcggcgaaaacatttcattgtctaggtccttcgtcgaaggatactgatttttctggttgagcgaagtcagtagtccagtaacgccgtaggccgacgtcaacatcgtaaccatcgctatagtctgagtgagattctccgcagtcgcgagcgcagtcgcgagcgtctcagcctccgttgccgggtcgctaacaacaaactgcgcccgcgcgggctgaatatatagaaagctgcaggtcaaaactgttgcaataagttgcgtcgtcttcatcgtttcctaccttatcaatcttctgcctcgtggtgacgggccatgaattcgctgagccagccagatgagttgccttcttgtgcctcgcgtagtcgagttgcaaagcgcaccgtgttggcacgccccgaaagcacggcgacatattcacgcatatcccgcagatcaaattcgcagatgacgcttccactttctcgtttaagaagaaacttacggctgccgaccgtcatgtcttcacggatcgcctgaaattccttttcggtacatttcagtccatcgacataagccgatcgatctgcggttggtgatggatagaaaatcttcgtcatacattgcgcaaccaagctggctcctagcggcgattccagaacatgctctggttgctgcgttgccagtattagcatcccgttgttttttcgaacggtcaggaggaatttgtcgacgacagtcgaaaatttagggtttaacaaataggcgcgaaactcatcgcagctcatcacaaaacggcggccgtcgatcatggctccaatccgatgcaggagatatgctgcagcgggagcgcatacttcctcgtattcgagaagatgcgtcatgtcgaagccggtaatcgacggatctaactttacttcgtcaacttcgccgtcaaatgcccagccaagcgcatggccccggcaccagcgttggagccgcgctcctgcgccttcggcgggcccatgcaacaaaaattcacgtaaccccgcgattgaacgcatttgtggatcaaacgagagctgacgatggataccacggaccagacggcggttctcttccggagaaatcccaccccgaccatcactctcgatgagagccacgatccattcgcgcagaaaatcgtgtgaggctgctgtgttttctaggccacgcaacggcgccaacccgctgggtgtgcctctgtgaagtgccaaatatgttcctcctgtggcgcgaaccagcaattcgccaccccggtccttgtcaaagaacacgaccgtacctgcacggtcgaccatgctctgttcgagcatggctagaacaaacatcatgagcgtcgtcttacccctcccgataggcccgaatattgccgtcatgccaacatcgtgctcatgcgggatatagtcgaaaggcgttccgccattggtacgaaatcgggcaatcgcgttgccccagtggcctgagctggcgccctctggaaagttttcgaaagagacaaaccctgcgaaattgcgtgaagtgattgcgccagggcgtgtgcgccacttaaaattccccggcaattgggaccaataggccgcttccataccaataccttcttggacaaccacggcacctgcatccgccattcgtgtccgagcccgcgcgcccctgtccccaagactattgagatcgtctgcatagacgcaaaggctcaaatgatgtgagcccataacgaattcgttgctcgcaagtgcgtcctcagcctcggataatttgccgatttgagtcacggctttatcgccggaactcagcatctggctcgatttgaggctaagtttcgcgtgcgcttgcgggcgagtcaggaacgaaaaactctgcgtgagaacaagtggaaaatcgagggatagcagcgcgttgagcatgcccggccgtgtttttgcagggtattcgcgaaacgaatagatggatccaacgtaactgtcttttggcgttctgatctcgagtcctcgcttgccgcaaatgactctgtcggtataaatcgaagcgccgagtgagccgctgacgaccggaaccggtgtgaaccgaccagtcatgatcaaccgtagcgcttcgccaatttcggtgaagagcacaccctgcttctcgcggatgccaagacgatgcaggccatacgctttaagagagccagcgacaacatgccaaagatcttccatgttcctgatctggcccgtgagatcgttttccctttttccgcttagcttggtgaacctcctctttaccttccctaaagccgcctgtgggtagacaatcaacgtaaggaagtgttcattgcggaggagttggccggagagcacgcgctgttcaaaagcttcgttcaggctagcggcgaaaacactacggaagtgtcgcggcgccgatgatggcacgtcggcatgacgtacgaggtgagcatatattgacacatgatcatcagcgatattgcgcaacagcgtgttgaacgcacgacaacgcgcattgcgcatttcagtttcctcaagctcgaatgcaacgccatcaattctcgcaatggtcatgatcgatccgtcttcaagaaggacgatatggtcgctgaggtggccaatataagggagatagatctcaccggatctttcggtcgttccactcgcgccgagcatcacaccattcctctccctcgtgggggaaccctaattggatttgggctaacagtagcgcccccccaaactgcactatcaatgcttcttcccgcggtccgcaaaaatagcaggacgacgctcgccgcattgtagtctcgctccacgatgagccgggctgcaaaccataacggcacgagaacgacttcgtagagcgggttctgaacgataacgatgacaaagccggcgaacatcatgaataaccctgccaatgtcagtggcaccccaagaaacaatgcgggccgtgtggctgcgaggtaaagggtcgattcttccaaacgatcagccatcaactaccgccagtgagcgtttggccgaggaagctcgccccaaacatgataacaatgccgccgacgacgccggcaaccagcccaagcgaagcccgcccgaacatccaggagatcccgatagcgacaatgccgagaacagcgagtgactggccgaacggaccaaggataaacgtgcatatattgttaaccattgtggcggggtcagtgccgccacccgcagattgcgctgcggcgggtccggatgaggaaatgctccatgcaattgcaccgcacaagcttggggcgcagctcgatatcacgcgcatcatcgcattcgagagcgagaggcgatttagatgtaaacggtatctctcaaagcatcgcatcaatgcgcacctccttagtataagtcgaataagacttgattgtcgtctgcggatttgccgttgtcctggtgtggcggtggcggagcgattaaaccgccagcgccatcctcctgcgagcggcgctgatatgacccccaaacatcccacgtctcttcggattttagcgcctcgtgatcgtcttttggaggctcgattaacgcgggcaccagcgattgagcagctgtttcaacttttcgcacgtagccgtttgcaaaaccgccgatgaaattaccggtgttgtaagcggagatcgcccgacgaagcgcaaattgcttctcgtcaatcgtttcgccgcctgcataacgacttttcagcatgtttgcagcggcagataatgatgtgcacgcctggagcgcaccgtcaggtgtcagaccgagcatagaaaaatttcgagagtttatttgcatgaggccaacatccagcgaatgccgtgcatcgagacggtgcctgacgacttgggttgcttggctgtgatcttgccagtgaagcgtttcgccggtcgtgttgtcatgaatcgctaaaggatcaaagcgactctccaccttagctatcgccgcaagcgtagatgtcgcaactgatggggcacacttgcgagcaacatggtcaaactcagcagatgagagtggcgtggcaaggctcgacgaacagaaggagaccatcaaggcaagagaaagcgaccccgatctcttaagcataccttatctccttagctcgcaactaacaccgcctctcccgttggaagaagtgcgttgttttatgttgaagattatcgggagggtcggttactcgaaaattttcaattgcttctttatgatttcaattgaagcgagaaacctcgcccggcgtcttggaacgcaacatggaccgagaaccgcgcatccatgactaagcaaccggatcgacctattcaggccgcagttggtcaggtcaggctcagaacgaaaatgctcggcgaggttacgctgtctgtaaacccattcgatgaacgggaagcttccttccgattgctcttggcaggaatattggcccatgcctgcttgcgctttgcaaatgctcttatcgcgttggtatcatatgccttgtccgccagcagaaacgcactctaagcgattatttgtaaaaatgtttcggtcatgcggcggtcatgggcttgacccgctgtcagcgcaagacggatcggtcaaccgtcggcatcgacaacagcgtgaatcttggtggtcaaaccgccacgggaacgtcccatacagccatcgtcttgatcccgctgtttcccgtcgccgcatgttggtggacgcggacacaggaactgtcaatcatgacgacattctatcgaaagccttggaaatcacactcagaatatgatcccagacgtctgcctcacgccatcgtacaaagcgattgtagcaggttgtacaggaaccgtatcgatcaggaacgtctgcccagggcgggcccgtccggaagcgccacaagatgacattgatcacccgcgtcaacgcgcggcacgcgacgcggcttatttgggaacaaaggactgaacaacagtccattcgaaatcggtgacatcaaagcggggacgggttatcagtggcctccaagtcaagcctcaatgaatcaaaatcagaccgatttgcaaacctgatttatgagtgtgcggcctaaatgatgaaatcgtccttctagatcgcctccgtggtgtagcaacacctcgcagtatcgccgtgctgaccttggccagggaattgactggcaagggtgctttcacatgaccgctcttttggccgcgatagatgatttcgttgctgctttgggcacgtagaaggagagaagtcatatcggagaaattcctcctggcgcgagagcctgctctatcgcgacggcatcccactgtcgggaacagaccggatcattcacgaggcgaaagtcgtcaacacatgcgttataggcatcttcccttgaaggatgatcttgttgctgccaatctggaggtgcggcagccgcaggcagatgcgatctcagcgcaacttgcggcaaaacatctcactcacctgaaaaccactagcgagtctcgcgatcagacgaaggccttttacttaacgacacaatatccgatgtctgcatcacaggcgtcgctatcccagtcaatactaaagcggtgcaggaactaaagattactgatgacttaggcgtgccacgaggcctgagacgacgcgcgtagacagttttttgaaatcattatcaaagtgatggcctccgctgaagcctatcacctctgcgccggtctgtcggagagatgggcaagcattattacggtcttcgcgcccgtacatgcattggacgattgcagggtcaatggatctgagatcatccagaggattgccgcccttaccttccgtttcgagttggagccagcccctaaatgagacgacatagtcgacttgatgtgacaatgccaagagagagatttgcttaacccgatttttttgctcaagcgtaagcctattgaagcttgccggcatgacgtccgcgccgaaagaatatcctacaagtaaaacattctgcacaccgaaatgcttggtgtagacatcgattatgtgaccaagatccttagcagtttcgcttggggaccgctccgaccagaaataccgaagtgaactgacgccaatgacaggaatcccttccgtctgcagataggtaccatcgatagatctgctgcctcgcgcgtttcggtgatgacggtgaaaacctctgacacatgcagctcccggagacggtcacagcttgtctgtaagcggatgccgggagcagacaagcccgtcagggcgcgtcagcgggtgttggcgggtgtcggggcgcagccatgacccagtcacgtagcgatagcggagtgtatactggcttaactatgcggcatcagagcagattgtactgagagtgcaccatatgcggtgtgaaataccgcacagatgcgtaaggagaaaataccgcatcaggcgctcttccgcttcctcgctcactgactcgctgcgctcggtcgttcggctgcggcgagcggtatcagctcactcaaaggcggtaatacggttatccacagaatcaggggataacgcaggaaagaacatgtgagcaaaaggccagcaaaaggccaggaaccgtaaaaaggccgcgttgctggcgtttttccataggctccgcccccctgacgagcatcacaaaaatcgacgctcaagtcagaggtggcgaaacccgacaggactataaagataccaggcgtttccccctggaagctccctcgtgcgctctcctgttccgaccctgccgcttaccggatacctgtccgcctttctcccttcgggaagcgtggcgctttctcatagctcacgctgtaggtatctcagttcggtgtaggtcgttcgctccaagctgggctgtgtgcacgaaccccccgttcagcccgaccgctgcgccttatccggtaactatcgtcttgagtccaacccggtaagacacgacttatcgccactggcagcagccactggtaacaggattagcagagcgaggtatgtaggcggtgctacagagttcttgaagtggtggcctaactacggctacactagaaggacagtatttggtatctgcgctctgctgaagccagttaccttcggaaaaagagttggtagctcttgatccggcaaacaaaccaccgctggtagcggtggtttttttgtttgcaagcagcagattacgcgcagaaaaaaaggatctcaagaagatcctttgatcttttctacggggtctgacgctcagtggaacgaaaactcacgttaagggattttggtcatgagattatcaaaaaggatcttcacctagatccttttaaattaaaaatgaagttttaaatcaatctaaagtatatatgagtaaacttggtctgacagttaccaatgcttaatcagtgaggcacctatctcagcgatctgtctatttcgttcatccatagttgcctgactccccgtcgtgtagataactacgatacgggagggcttaccatctggccccagtgctgcaatgataccgcgagacccacgctcaccggctccagatttatcagcaataaaccagccagccggaagggccgagcgcagaagtggtcctgcaactttatccgcctccatccagtctattaattgttgccgggaagctagagtaagtagttcgccagttaatagtttgcgcaacgttgttgccattgctgcaggggggggggggggggggttccattgttcattccacggacaaaaacagagaaaggaaacgacagaggccaaaaagctcgctttcagcacctgtcgtttcctttcttttcagagggtattttaaataaaaacattaagttatgacgaagaagaacggaaacgccttaaaccggaaaattttcataaatagcgaaaacccgcgaggtcgccgccccgtaacctgtcggatcaccggaaaggacccgtaaagtgataatgattatcatctacatatcacaacgtgcgtggaggccatcaaaccacgtcaaataatcaattatgacgcaggtatcgtattaattgatctgcatcaacttaacgtaaaaacaacttcagacaatacaaatcagcgacactgaatacggggcaacctcatgtcccccccccccccccccctgcaggcatcgtggtgtcacgctcgtcgtttggtatggcttcattcagctccggttcccaacgatcaaggcgagttacatgatcccccatgttgtgcaaaaaagcggttagctccttcggtcctccgatcgttgtcagaagtaagttggccgcagtgttatcactcatggttatggcagcactgcataattctcttactgtcatgccatccgtaagatgcttttctgtgactggtgagtactcaaccaagtcattctgagaatagtgtatgcggcgaccgagttgctcttgcccggcgtcaacacgggataataccgcgccacatagcagaactttaaaagtgctcatcattggaaaacgttcttcggggcgaaaactctcaaggatcttaccgctgttgagatccagttcgatgtaacccactcgtgcacccaactgatcttcagcatcttttactttcaccagcgtttctgggtgagcaaaaacaggaaggcaaaatgccgcaaaaaagggaataagggcgacacggaaatgttgaatactcatactcttcctttttcaatattattgaagcatttatcagggttattgtctcatgagcggatacatatttgaatgtatttagaaaaataaacaaataggggttccgcgcacatttccccgaaaagtgccacctgacgtctaagaaaccattattatcatgacattaacctataaaaataggcgtatcacgaggccctttcgtcttcaagaattggtcgacgatcttgctgcgttcggatattttcgtggagttcccgccacagacccggattgaaggcgagatccagcaactcgcgccagatcatcctgtgacggaactttggcgcgtgatgactggccaggacgtcggccgaaagagcgacaagcagatcacgcttttcgacagcgtcggatttgcgatcgaggatttttcggcgctgcgctacgtccgcgaccgcgttgagggatcaagccacagcagcccactcgaccttctagccgacccagacgagccaagggatctttttggaatgctgctccgtcgtcaggctttccgacgtttgggtggttgaacagaagtcattatcgtacggaatgccaagcactcccgaggggaaccctgtggttggcatgcacatacaaatggacgaacggataaaccttttcacgcccttttaaatatccgttattctaataaacgctcttttctcttag

SEQ ID NO: 10 - DNA, 60503 bp, artificial
  PHP38463
  misc_feature (987)..(987): n is a, c, g, or t
gtttacccgccaatatatcctgtcaaacactgatagtttaaactgaaggcgggaaacgacaatctgatcatgagcggagaattaagggagtcacgttatgacccccgccgatgacgcgggacaagccgttttacgtttggaactgacagaaccgcaacgttgaaggagccactcagcaagctggtacgattgtaatacgactcactatagggcgaattgagcgctgtttaaacgctcttcaactggaagagcggttaccagagctggtcacctttgtccaccaagatggaactgcggccgctcattaattaagtcaggcgcgcctctagttgaagacacgttcatgtcttcatcgtaagaagacactcagtagtcttcggccagaatggccatctggattcagcaggcctagaaggccatttaaatcctgaggatctggtcttcctaaggacccgggatatcgctatcaactttgtatagaaaagttgggccgaattcgagctcggtacggccagaatggcccggaccgggttaccgaattcgagctcggtaccgggcggccgaagctggccttctaggcccggaccgggtgacccggaccggaattcgagctccaccgcggtggcggccgcattcgcaaaacacacctagactagatttgttttgctaacccaattgatattaattatatatgattaatatttatatgtatatggatttggttaatgaaatgcatctggttcatcaaagaattataaagacacgtgacattcatttaggataagaaatatggatgatctctttctcttttattcagataactagtaattacacataacacacaactttgatgcccacattatagtgattagcatgtcactatgtgtgcatccttttatttcatacattaattaagttggccaatccagaagatggacaagcctaggtgggcctgctactatgatgtttagaattgcttcgagatcnccattattattaattacagcagatcactaacgatctatagtcaaaacattgcagcagaaccctaattatatatctgtacctcgtgatgcatgttgcagcaatatccctccctagctctgatatatatagggctagtttggaaactcgaatccccttcgtgattgaagggggttagagaagaaattagttcatttccatctcaatttcctccaatcccgaaggggatctgaggttcccaaagtagcctatagtgatatgttggtacatcatccaacacggcgccgcctagatggtaatcaccccccatcatccacctcccggccggcccccaaaattccggccgatcgagatcgattcggggagatctccgaccgatcaacgactggtctctctctgcaatttctctgcagagcttcatcgagccctcttgcttgcttggatcaattgaaactcgatcaggtccacagcacagcctgctgcatgcatgatgctcgatgaggctctgcagagagatggcagggagggccattatgtctacgatattaactgatccggggtgtgggtacggtggtgtcctagcaaatctgggggacggatccatggcggcggcggccggggagtgggccgggaagcgcgaacgaagctggagatggttggaccggcgcggcgtgttgctcgtgctgctcctctgctgcgagttgattgatcaatgcagggcgccggccggtggcttcaaatagggatggggagttggcgagtgtgtggtcggcgtgtgcaacgggattggaaaggcatgcatgtgatcggcggtaagggtagccgagacgtgcgcgcggctgtggctacgctgcttttggctgggatcgctgctgtggacgtactttgtcactgcgcacttgcctgcttgtgttattccgctggctaatattgcctgtttgcaggacgtggagaggggtgtctgctagtgctagctagtggtaaggatggggacgatgcttcaaataactcctcgtgttcttctctagtctaactaaacgaactaaattaaaaaaataagaaagaaattgtttatttagtttattaagttagactagagaaaaaccgcgcaagtatgcatttagagtaccatcttcattcttagctagtggtaaccgcaaaggggaccgggagagctgcggcgcaccttgctcctggatcgtttttggcttggctttgctgctgttaacgtgctttgtcactgctcacctgccttcttgtgttattcggttggctgatgggtttgcaggatggggagaggggtgtctgtttgcagtcaaggccggattctggggatcggtagaatttggaggtttgcttgcacgcgatgtggagagaggtgtctgttagcaacggaggatgcatggcgctggaggaaggctttgcagggtgtggaggagagggtgcctgttatccagtaatgttaatgttaggaacatagatgtcctatatccatgtaaactgtggaaacagaacttaatttccttaggagaccgggaaacaaaaaatgaacttgtggttaaggatatggactataattttgtggttcaaagaaaggtattggtatacatggctgccgtagggataagggtcatacatggctgccgtagggataagggtgttgttactctaccaagggcaccatacaggtggctgcacagcattcaggcgctgccaaatctagcgcgcacatcactgggtcaagccgacacagatttggacaatacgatgtgtagcagctggtggtggtgaagatatgcggatttaagagagaggtggatttgggttgggaggagcaacttgcatcgtcgtggatctccacacaaaaaagaagaattggaaatgtataatactatacatatgcttaaatgaaagtatttactgaattgtggatcgatgcattaattgtcatcacaagtgaaaattaggtaataatgagtactagttaatagttgagcacggaaaaagcaagcttggatccgatatcgatgggccctggccgaagcttggtcacccggtccgggcctagaaggccagcttcaagtttgtacaaaaaagcaggctccggccagaatggcccggaccgggttaccgaattcgagctcggtaccaggtttcgaggaagaagccacgaagtgtgtttgatactacatgtgttcaggaaactacatgtatatgtttaatactaatatgatgtggaattttacaatggacagtgtcactaggctttgtcgtttacgaattaccatcttagtctctatgattaggtgaagtgtttagaaacttttccatatagtctaggcttgctctttgggatcatgcgaggagccacttaaataaatttaagagtaaaatattatgtaaagtatgagtccaaaatcaatttttcttgacgaaattattctattattttgttccttataagtctagtcaactgtcgtaaatcagtataccttagacgataagcctaaattgattacgaaaggtgcttgattcttaattggttgtccatcaacgttgaaacgtattttctcaagtaaatacatcttttgagaaaacatatacaacttaggatgacatatcttgcgacttgcatgaaggcaggttacaattacgtttcaagctaagattttctctaaatcggtagtaggaaagttttaacggtcgctgaaagtttatgtttttatcgactgaccggatcaaccgataattaaaaaaattattttgaaaatttgatgtcacaaataaataagaaatttgaatttttttttatagagtttttgcatagtaatctttgtattttacttttttttttaaatcatgtttagacaaatagaaatggcatgaataatatgtgagatattgaaagtgattagtttgaatgaaattaattttaagaaacttgagtttgattgtttttctttaggcaatacaaaatttgatttggagtgcaaataaaatgtcgtcttgtttagtatgctcggactcttagataagcatgcttacctctttggaatgacgtcaatttggatgattttatatacgttcgcaatgacgtcgactgaatcattttatacgattatagtcatgattaaactagactcagttggtaagtatgaaaaaatgggtctaaattaacgtggcacacctaaagattcggtactaaaataaagaaaacctagctaggaaaactaaatatctcaagcatacaatttttattttcttggatgatgatgtcaatgcaggtcatttatgtattaagtattaaccaatactagctagggtttcgaatccaacaagtcagtttctcatctcacggacaatcatgaacttgagcttgaaaaggctcattataaacaaagtaatagcccaaatcataagtggcggaaagattaagagtagtcctggacgttcggttatctaattcggctttggttcgtatacattcggttatcgtttttttttgttctaaagtttagtatttattcgatttttgaaattttggttcgattttggttttgttccagttttttcggttttaaaatttggtatccattcggttattttgctttgaatattttgggatatttcggttgtttttgaatatttgtggttattttcgagtatttttactattttatataaatttttaagtatttttaattatttaatctagaaattattaatatttttgacaatataattatatttcggatatttttggttacattaaatattttgattcggtttcagttctttcagttataggatttagttttcattcggttatttttaaattttcggtttggttcgattatttttgctttggttttggtcgggtacatacagtttgaattatttgcccacacctaattaagagcatcaactaaagataatcatgagtcttgggctttacaaggcccattaagatcaaagtgaaatgcccaaatcatatatggcaaccagtggaaagcttaagagcatcatcaactaaacaagagccattttctcagttgtttattcattttctccatcgtacatagaaagagacaactagtcataactccaattttttgaaccttcccactccaacaatgccgattcaagtagcgagagcttaacaatcagcaataatggtagaaaaacgagtaggtccaaagatatgcaagactcggaataactttcagtttctgagtaacacaaagtattgatgatggattgtgttattcaccatgaaagtaacggatagagaaatgttgcttgagaatgagactgacaaatcagactgtcatattcttgtgggttttctctatgcaggtgaaaccaaaagtacaagggtactatgtaccttcagcttagaaatgatgtgttttctacacttttctcttcttttttttcttttcatctcacatgaatcaaaaagagaaagcttaattacattaaaggttgatgtgatatttactttctaaatatttgctagaagaaattataatgataacattaaattaagttatagtcatttctatttcggttgtctcccactttctgctatgcttttacaacaacagttcaagatttggaatcgttttctttctccaccaatcgtagtaatacttctttttgtgtttgttgaaattttgcaagattctctcttcctctggttaatacacataacttacttggtaagcttggctgcattttcttttcaagcttttaatcaaagactcactagaaattgcaaaggcaaacataaaattatgtgatcaaactcctactgtgagtttttggttacaaacaaaagttaaaaacaaaagcttgatatttaaaagataaactcaacacatatgcatttgactggcgcacagaagacaattcaagacttgggaaaacagtgagccatcaaaatcgtcagataattcagggaatatattgaatgtggagatgtggtaatcacactattgcacacaaagagtggcaaacaagcggcgcccttggtttggtatagtaagagacaattgttttggactgtttgtgttgccatattcacaaaaatactattgagctatgtatgttaaacattatggtcaatgagtagtagtgaacattcaagtttttttttttttccacttcaagtttttcatcttattattatttttcgttgtgatgcagtagtacggcccatcttcaccagtagtatatcaaagccgaaacagatgacaaattgtttaacatgcacttggattattattgagagttgaaatacaaaggcccgttacaagcccaaacgaaggtacataaaagaaaagcagaaaatgaaaacgaaatcgatagggataagtttttccaactgacggaaacacaaactacaccaggtgaaatagatcacctcccaagtgcatgagacacgaaccaaccacttatcatcagatcacaaaaacctaggcgccctagccagtgttctgcatgccggcggcgatgcccttcatggtgaggatgagcgtgtcttccaggccgggcgggtactcgctcgccgggttcagcttgaccagtccggcgggcttgttctcgtcggcgaactccttggacagcggcggctggggcgtcaccttgaagttggggtcccttatccgcttcagcgtgtaggcctggaacacgttcagggtggtgatgtaggggttgcgcagcaccagcccctgcttcaggtatggatcgccttcaagaatatccttgtgcccagcgatctggaggagaagctgctgtgtctccacgtatttgtccctgagctgcttcccaaagggcttgagttcttccgccacaagcagctcgtcatacaagccggcaatgccggggtctcccttggcgaaaaccatctccagcaggtccagggtgaccctgaagaatggccactcgttgtacatctctttgaggacctggaagttcttgacgtccttgtcgatggcccacttgaatgcggcgccgactcccagccacacgggaaggtggaacctggtctgagtccacgagaagatccaggggatggcgcgcagggtcgtgatgccgccgccgggcctcctcttggctggccggctgccgatgttcatcctcccgtactcggtctccggtgtagccgatctgaagtactcgacgaagcgcggctccttgacgacgaccgagcggtactcctccgtggccacgaccgccatctcgtccatgagcttgcgccactcgggcttgggagagaccggcgggtgcatgccgtgctccagcgtggcggccgtgaagcgctgcagagtctggaagcacaggtgctcctccccgaagcagaactcgatgacctcgccctgcaccgtcacacggatggacccgttgatggtgtccggcggctgggacaggatggcaaggtgcgtgggcccgccacccctgcccacggtgcctccgcggccgtggaacaaggtgagcttgacgccgtagcgcttggccacctgcgccatctcctcctgcgccctgtacagctgccacgccgcggacaggcggccggcgtccttgccggagtcggagtagccgaccatgacctgctgcttgcccttgatccggtccatgtaccagtccaccgagaagaggcgctccacggacgcgggcgccgactgcaggtcggccagcctctcgaacagcggcaccacgggcagcggctgcttgatgccgcactcgcgctgcaggagctctacggcgagcacgtccgagggggccgtcgccatagagatgatgtaggggccgaagctgtcgggcgggagctccgcgaggacgtggaacgcgccgatgacgtcggcgatctcgtcggtctggggaaggtccgggggcagcagcgggcgcttgcccttcagctccgacagcagccactcctgcctcttgtcctcggaccactcgcggtacgacccgatgccgaggtgcgtggtgatggcgtcgatcacgtcggtgtgccgctccgactcctgccggatgtccagcttcaccagggagagcccgaacgtgaacacctggcgcaggaggtccaggaggctcccgtccgcgatggccttgtcgccgcagtcacacagtgatttgtagcacagctcaagtggctcaaggaactcttcgatactggtaaatgacgattccgctgaaatttcagaaactccagatgccagcagatggcgagcacgctcgcgtgtgttgtacagcttgtcccttacatggcctagtatcacccggtagggctcgtttggaggaatttgcttccagaattctatgtaatacttggtaactttggaaccagccgaactctggagctcttcggcacgaacacgaagctcatcgttgcagcgccacatagagagctcaaacatcagctcttcaatctgatcgatgtacaagtttgcagccatcattctggccagcaagcatacatctcttgtcacctccggggtaactcttggatttcctatatagcgatagattgcaaagatatacaggcttagaaaaaacatataattctgtatatataattttctggcgagaaaagaaaaacgttagccttgaatattgacaggacaagtactgatataatataagcactctttgatatataaaataatactacacgtataattctgtgatataaaaaattcaacaagttaggttccaggttgcaatataaagatttgattaaattatgcttatatgttgtgctagcatgtatggatgataaatttttattagtgaggtgtactaaataatttctattttaaaattctagctcctgagagctcgaaatgatagactagtttttctgaacatctattgcagtcagagtaaagcaggaaggtttctctcaagctgaaagacagagagctcctgccactttattgaaaagggtaggcagaaatgtaccatcgcggtcaccacccatccaagaagagaaccgaatgagagaaacattgtagggaaggcgctcattgatgccgatattcttcagggctgtatccacacggcgcaagaacttaggcacgcccttccatacagtctcatggatgtagctcatcccatagcgcatttcgtcctggggggtgggttgtgccctcctgatttcatcggttctgaaggctgcttggatctgtgaacacccaagaaaaggaattagaactaaacaacccaaacaacaaaaataccactttggtggcttgaagcagtaaacttctcaggtggtctgcatcatatatatgcaccatgagagagacgctctttaccgagtgctcagtgatgacattatgactcgtctgaaatttgtaacactaggaacttgagcatagcctagctaattgagggtgtggagttaaggctatctaggtttgattcctcatcaaggagaaactggatgccctacttgttaggaaaatataatgatgagtacaacaacttgattacaactaaaccattaatgcatctgtggtaccgaagttctactcaaatggctctatatgagtaagagatctttgtacaaaatgatcttttttaagtaaaaggaaaatgctttgagcacagctggagaatagcatataaataattcagtgtagttttcatcaagtggtcttcaacattgaatcttaagtcaagtcggcctcatataaataattctgttatacatgtagcagttctctcattgcattgttaaaacataaatgtgcagtctagttctttcctgattaggttagtttctactttggagtttgcaaagacagtttaaatagtggaaaagtttggttgtttattaccttagcttgataataatgaatatttatttatatgtgttttaatgggagaacctgacctgacttgacatataaattgaagatttctctggcgcactaacttacacgtgtcgtgctcgatgtcttgcaagctcatgagtccacgtgtactgtgcatgtgttctattctatctctatcaaagaatgaatgtctcttgataaagttcttgcattccctggtgtgaaatgtaatatgtacgtacctctctctgcagagcctcatcgagctcctgcttgtcgtcgtcagtgatgtccttggcattcagctgggtcagacaattccggatcctgcagcgacaagaccgacatttttatttatcaaaaataataataatggttaagacttaagggtatataacgtgagtagcatatcgatcaagccattgaaaaatatatacccggcatttttttgcaggagcgagcggcgggcggactgtgtgggatgcgcggtgaagacgaggtcgatggtctggttcttgagcgcctcgaacacctcctcgggggacttgccgacctcggacacgaggcgcttgagcgtctcctcgatgtcggactcggtggtggcggagccctcgtcggcgaacccacctttcttgagcttgctgttgcggcggcggcgcgcgatctgcacctcctcggcgaggttggcgaggttgagcatgtgcaggatggagctcgccacgaggatggcgtcggcgggggccagccccgtgagcttggcgccgagctcgcccagcttcgtcgtgtctcctttgccctcgtagtcggctgagacctcgtagcactcctggacctgcatgcatgcattacagtaagcactggcggggagacgtacgagcagtgccgcgcgcaggcggcaaccggtcgaagaagaaatgggcggcggcagtggttagttacaaattcgcgaaggctgggcccgtggaggtcctggaggatgttgaggaagcggtcgacgagcagcgcatcgtactcgatgagcttgtcgtcctcggagaccttgcctgggaccagctgacggagctgcgcgtcgatggagtggtgcttctcgccggggccgggagccttggtcgacgccatggcgcggcgggaagctaagcacggaagcgagatggttggagcggcacggcgtgctgctcgtgctgctgcgatgcgattggtgatcaatgcagtgcgcgggtgggttcaaatagggatggggagtcgttggcgggcgggtgtgtgtgtggctgtgcacgggaacgggcggccctcggcgttcggaaaggcgcggccttgggcatgtgatcggcggtaaccgcaacggaaccggctgcggctgaggctcctttttggcttggcttgctgctgttagcggccggaggggatgtggagaggggtgtctgctactgctggcggcaatcgcaaggggacctggagagctgcggctgcggcttgggcttgctcctccttgctcctttttggcttggctcggtgctgttgacgtgctttgtcactgctcacctgccttcttgtgttattccgttggctaattgggtagcaggatgtggagagggcgtcccttagcagttaatgctggattcgggggatcgcaagaatttggaggaatgctttgcaggatgtggagagggcgtctgttagcaagtaggctgcatcggagtgaagaatctggagggatgtggcgagggtgtctgtttgcaggatgtggttgagggtgcagtgaggcggctgtggctaagagtcgtctttgtagataattttttgtttccattaacatttaaattaaatttatgattttaaaatttagtttcctaggaggataaggaaaaaaaaaagtgaacctgtggttaggaactcggcattttattgttccaaataagtgttcaacctgaacaagaagtgccgctataataaattattgtggttcaagaaaaagtatatttaattcttggtatgcatacatggctattgtagggataaggggtgtcattctacgaagggcaccatacatatagggataaggatgttgttctaccaagggcaccgtacaggtgtctcctccattggcgccgaccgtgcacaagccaacaaagatatgcacgatgcgatgtgttgttggcacttggcagcggtgaacatgcacggattgaagagagaggtggatttgggttgggatatccacacaaaaagaagaattttaaaatatagactgtgtgcttaaatgtacatatttacagaattatggtctaatgcatttgttatcacaattagaaatgagataatgctaggtaattgaaaatagaaaaaccatcgaatgaccttacatttatattagtagctaaccacgtgtcctaacaccattacatcgctagatcctcgacatactatcaacattgtgcattacatcgagctaagtaaagaactgatcggccaggatccgatatcgatgggccctggccgaagcttggtcacccggtccgggcctagaaggccgatctcccgggcacccagctttcttgtacaaagtggccgttaacggatcggccagaatggcccggaccgaagctggccgctctagaactagtggatctcgatgtgtagtctacgagaagggttaaccgtctcttcgtgagaataaccgtggcctaaaaataagccgatgaggataaataaaatgtggtggtacagtacttcaagaggtttactcatcaagaggatgcttttccgatgagctctagtagtacatcggacctcacatacctccattgtggtgaaatattttgtgctcatttagtgatgggtaaattttgtttatgtcactctaggttttgacatttcagttttgccactcttaggttttgacaaataatttccattccgcggcaaaagcaaaacaattttattttacttttaccactcttagctttcacaatgtatcacaaatgccactctagaaattctgtttatgccacagaatgtgaaaaaaaacactcacttatttgaagccaaggtgttcatggcatggaaatgtgacataaagtaacgttcgtgtataagaaaaaattgtactcctcgtaacaagagacggaaacatcatgagacaatcgcgtttggaaggctttgcatcacctttggatgatgcgcatgaatggagtcgtctgcttgctagccttcgcctaccgcccactgagtccgggcggcaactaccatcggcgaacgacccagctgacctctaccgaccggacttgaatgcgctaccttcgtcagcgacgatggccgcgtacgctggcgacgtgcccccgcatgcatggcggcacatggcgagctcagaccgtgcgtggctggctacaaatacgtaccccgtgagtgccctagctagaaacttacacctgcaactgcgagagcgagcgtgtgagtgtagccgagtagatcccccggtcgccaccatggcctcctccgagaacgtcatcaccgagttcatgcgcttcaaggtgcgcatggagggcaccgtgaacggccacgagttcgagatcgagggcgagggcgagggccgcccctacgagggccacaacaccgtgaagctgaaggtgaccaagggcggccccctgcccttcgcctgggacatcctgtccccccagttccagtacggctccaaggtgtacgtgaagcaccccgccgacatccccgactacaagaagctgtccttccccgagggcttcaagtgggagcgcgtgatgaacttcgaggacggcggcgtggcgaccgtgacccaggactcctccctgcaggacggctgcttcatctacaaggtgaagttcatcggcgtgaacttcccctccgacggccccgtgatgcagaagaagaccatgggctgggaggcctccaccgagcgcctgtacccccgcgacggcgtgctgaagggcgagacccacaaggccctgaagctgaaggacggcggccactacctggtggagttcaagtccatctacatggccaagaagcccgtgcagctgcccggctactactacgtggacgccaagctggacatcacctcccacaacgaggactacaccatcgtggagcagtacgagcgcaccgagggccgccaccacctgttcctgtagcggcccatggatattcgaacgcgtaggtaccacatggttaacctagacttgtccatcttctggattggccaacttaattaatgtatgaaataaaaggatgcacacatagtgacatgctaatcactataatgtgggcatcaaagttgtgtgttatgtgtaattactagttatctgaataaaagagaaagagatcatccatatttcttatcctaaatgaatgtcacgtgtctttataattctttgatgaaccagatgcatttcattaaccaaatccatatacatataaatattaatcatatataattaatatcaattgggttagcaaaacaaatctagtctaggtgtgttttgcgaatgcggccgccaccgcggtggagctcgaattccggtccgggcctagaaggccagcttcggccgccccgggcaactttattatacaaagttgatagatatcggaccgattaaactttaattcggtccgaagcttgcatgcctgcagtgcagcgtgacccggtcgtgcccctctctagagataatgagcattgcatgtctaagttataaaaaattaccacatattttttttgtcacacttgtttgaagtgcagtttatctatctttatacatatatttaaactttactctacgaataatataatctatagtactacaataatatcagtgttttagagaatcatataaatgaacagttagacatggtctaaaggacaattgagtattttgacaacaggactctacagttttatctttttagtgtgcatgtgttctcctttttttttgcaaatagcttcacctatataatacttcatccattttattagtacatccatttagggtttagggttaatggtttttatagactaatttttttagtacatctattttattctattttagcctctaaattaagaaaactaaaactctattttagtttttttatttaataatttagatataaaatagaataaaataaagtgactaaaaattaaacaaataccctttaagaaattaaaaaaactaaggaaacatttttcttgtttcgagtagataatgccagcctgttaaacgccgtcgacgagtctaacggacaccaaccagcgaaccagcagcgtcgcgtcgggccaagcgaagcagacggcacggcatctctgtcgctgcctctggacccctctcgagagttccgctccaccgttggacttgctccgctgtcggcatccagaaattgcgtggcggagcggcagacgtgagccggcacggcaggcggcctcctcctcctctcacggcaccggcagctacgggggattcctttcccaccgctccttcgctttcccttcctcgcccgccgtaataaatagacaccccctccacaccctctttccccaacctcgtgttgttcggagcgcacacacacacaaccagatctcccccaaatccacccgtcggcacctccgcttcaaggtacgccgctcgtcctcccccccccccctctctaccttctctagatcggcgttccggtccatgcatggttagggcccggtagttctacttctgttcatgtttgtgttagatccgtgtttgtgttagatccgtgctgctagcgttcgtacacggatgcgacctgtacgtcagacacgttctgattgctaacttgccagtgtttctctttggggaatcctgggatggctctagccgttccgcagacgggatcgatttcatgattttttttgtttcgttgcatagggtttggtttgcccttttcctttatttcaatatatgccgtgcacttgtttgtcgggtcatcttttcatgcttttttttgtcttggttgtgatgatgtggtctggttgggcggtcgttctagatcggagtagaattctgtttcaaactacctggtggatttattaattttggatctgtatgtgtgtgccatacatattcatagttacgaattgaagatgatggatggaaatatcgatctaggataggtatacatgttgatgcgggttttactgatgcatatacagagatgctttttgttcgcttggttgtgatgatgtggtgtggttgggcggtcgttcattcgttctagatcggagtagaatactgtttcaaactacctggtgtatttattaattttggaactgtatgtgtgtgtcatacatcttcatagttacgagtttaagatggatggaaatatcgatctaggataggtatacatgttgatgtgggttttactgatgcatatacatgatggcatatgcagcatctattcatatgctctaaccttgagtacctatctattataataaacaagtatgttttataattattttgatcttgatatacttggatgatggcatatgcagcagctatatgtggatttttttagccctgccttcatacgctatttatttgcttggtactgtttcttttgtcgatgctcaccctgttgtttggtgttacttctgcaggtcgactttaacttagcctaggatccacacgacaccatgtcccccgagcgccgccccgtcgagatccgcccggccaccgccgccgacatggccgccgtgtgcgacatcgtgaaccactacatcgagacctccaccgtgaacttccgcaccgagccgcagaccccgcaggagtggatcgacgacctggagcgcctccaggaccgctacccgtggctcgtggccgaggtggagggcgtggtggccggcatcgcctacgccggcccgtggaaggcccgcaacgcctacgactggaccgtggagtccaccgtgtacgtgtcccaccgccaccagcgcctcggcctcggctccaccctctacacccacctcctcaagagcatggaggcccagggcttcaagtccgtggtggccgtgatcggcctcccgaacgacccgtccgtgcgcctccacgaggccctcggctacaccgcccgcggcaccctccgcgccgccggctacaagcacggcggctggcacgacgtcggcttctggcagcgcgacttcgagctgccggccccgccgcgcccggtgcgcccggtgacgcagatctgagtcgaaacctagacttgtccatcttctggattggccaacttaattaatgtatgaaataaaaggatgcacacatagtgacatgctaatcactataatgtgggcatcaaagttgtgtgttatgtgtaattactagttatctgaataaaagagaaagagatcatccatatttcttatcctaaatgaatgtcacgtgtctttataattctttgatgaaccagatgcatttcattaaccaaatccatatacatataaatattaatcatatataattaatatcaattgggttagcaaaacaaatctagtctaggtgtgttttgcgaatgcggccgccaccgcggtggagctcgaattcattccgattaatcgtggcctcttgctcttcaggatgaagagctatgtttaaacgtgcaagcgctactagacaattcagtacattaaaaacgtccgcaatgtgttattaagttgtctaagcgtcaatttgtttacaccacaatatatcctgccaccagccagccaacagctccccgaccggcagctcggcacaaaatcaccactcgatacaggcagcccatcagtccgggacggcgtcagcgggagagccgttgtaaggcggcagactttgctcatgttaccgatgctattcggaagaacggcaactaagctgccgggtttgaaacacggatgatctcgcggagggtagcatgttgattgtaacgatgacagagcgttgctgcctgtgatcaaatatcatctccctcgcagagatccgaattatcagccttcttattcatttctcgcttaaccgtgacaggctgtcgatcttgagaactatgccgacataataggaaatcgctggataaagccgctgaggaagctgagtggcgctatttctttagaagtgaacgttgacgatcgtcgaccgtaccccgatgaattaattcggacgtacgttctgaacacagctggatacttacttgggcgattgtcatacatgacatcaacaatgtacccgtttgtgtaaccgtctcttggaggttcgtatgacactagtggttcccctcagcttgcgactagatgttgaggcctaacattttattagagagcaggctagttgcttagatacatgatcttcaggccgttatctgtcagggcaagcgaaaattggccatttatgacgaccaatgccccgcagaagctcccatctttgccgccatagacgccgcgccccccttttggggtgtagaacatccttttgccagatgtggaaaagaagttcgttgtcccattgttggcaatgacgtagtagccggcgaaagtgcgagacccatttgcgctatatataagcctacgatttccgttgcgactattgtcgtaattggatgaactattatcgtagttgctctcagagttgtcgtaatttgatggactattgtcgtaattgcttatggagttgtcgtagttgcttggagaaatgtcgtagttggatggggagtagtcatagggaagacgagcttcatccactaaaacaattggcaggtcagcaagtgcctgccccgatgccatcgcaagtacgaggcttagaaccaccttcaacagatcgcgcatagtcttccccagctctctaacgcttgagttaagccgcgccgcgaagcggcgtcggcttgaacgaattgttagacattatttgccgactaccttggtgatctcgcctttcacgtagtgaacaaattcttccaactgatctgcgcgcgaggccaagcgatcttcttgtccaagataagcctgcctagcttcaagtatgacgggctgatactgggccggcaggcgctccattgcccagtcggcagcgacatccttcggcgcgattttgccggttactgcgctgtaccaaatgcgggacaacgtaagcactacatttcgctcatcgccagcccagtcgggcggcgagttccatagcgttaaggtttcatttagcgcctcaaatagatcctgttcaggaaccggatcaaagagttcctccgccgctggacctaccaaggcaacgctatgttctcttgcttttgtcagcaagatagccagatcaatgtcgatcgtggctggctcgaagatacctgcaagaatgtcattgcgctgccattctccaaattgcagttcgcgcttagctggataacgccacggaatgatgtcgtcgtgcacaacaatggtgacttctacagcgcggagaatctcgctctctccaggggaagccgaagtttccaaaaggtcgttgatcaaagctcgccgcgttgtttcatcaagccttacagtcaccgtaaccagcaaatcaatatcactgtgtggcttcaggccgccatccactgcggagccgtacaaatgtacggccagcaacgtcggttcgagatggcgctcgatgacgccaactacctctgatagttgagtcgatacttcggcgatcaccgcttccctcatgatgtttaactcctgaattaagccgcgccgcgaagcggtgtcggcttgaatgaattgttaggcgtcatcctgtgctcccgagaaccagtaccagtacatcgctgtttcgttcgagacttgaggtctagttttatacgtgaacaggtcaatgccgccgagagtaaagccacattttgcgtacaaattgcaggcaggtacattgttcgtttgtgtctctaatcgtatgccaaggagctgtctgcttagtgcccactttttcgcaaattcgatgagactgtgcgcgactcctttgcctcggtgcgtgtgcgacacaacaatgtgttcgatagaggctagatcgttccatgttgagttgagttcaatcttcccgacaagctcttggtcgatgaatgcgccatagcaagcagagtcttcatcagagtcatcatccgagatgtaatccttccggtaggggctcacacttctggtagatagttcaaagccttggtcggataggtgcacatcgaacacttcacgaacaatgaaatggttctcagcatccaatgtttccgccacctgctcagggatcaccgaaatcttcatatgacgcctaacgcctggcacagcggatcgcaaacctggcgcggcttttggcacaaaaggcgtgacaggtttgcgaatccgttgctgccacttgttaacccttttgccagatttggtaactataatttatgttagaggcgaagtcttgggtaaaaactggcctaaaattgctggggatttcaggaaagtaaacatcaccttccggctcgatgtctattgtagatatatgtagtgtatctacttgatcgggggatctgctgcctcgcgcgtttcggtgatgacggtgaaaacctctgacacatgcagctcccggagacggtcacagcttgtctgtaagcggatgccgggagcagacaagcccgtcagggcgcgtcagcgggtgttggcgggtgtcggggcgcagccatgacccagtcacgtagcgatagcggagtgtatactggcttaactatgcggcatcagagcagattgtactgagagtgcaccatatgcggtgtgaaataccgcacagatgcgtaaggagaaaataccgcatcaggcgctcttccgcttcctcgctcactgactcgctgcgctcggtcgttcggctgcggcgagcggtatcagctcactcaaaggcggtaatacggttatccacagaatcaggggataacgcaggaaagaacatgtgagcaaaaggccagcaaaaggccaggaaccgtaaaaaggccgcgttgctggcgtttttccataggctccgcccccctgacgagcatcacaaaaatcgacgctcaagtcagaggtggcgaaacccgacaggactataaagataccaggcgtttccccctggaagctccctcgtgcgctctcctgttccgaccctgccgcttaccggatacctgtccgcctttctcccttcgggaagcgtggcgctttctcatagctcacgctgtaggtatctcagttcggtgtaggtcgttcgctccaagctgggctgtgtgcacgaaccccccgttcagcccgaccgctgcgccttatccggtaactatcgtcttgagtccaacccggtaagacacgacttatcgccactggcagcagccactggtaacaggattagcagagcgaggtatgtaggcggtgctacagagttcttgaagtggtggcctaactacggctacactagaaggacagtatttggtatctgcgctctgctgaagccagttaccttcggaaaaagagttggtagctcttgatccggcaaacaaaccaccgctggtagcggtggtttttttgtttgcaagcagcagattacgcgcagaaaaaaaggatctcaagaagatcctttgatcttttctacggggtctgacgctcagtggaacgaaaactcacgttaagggattttggtcatgagattatcaaaaaggatcttcacctagatccttttaaattaaaaatgaagttttaaatcaatctaaagtatatatgagtaaacttggtctgacagttaccaatgcttaatcagtgaggcacctatctcagcgatctgtctatttcgttcatccatagttgcctgactccccgtcgtgtagataactacgatacgggagggcttaccatctggccccagtgctgcaatgataccgcgagacccacgctcaccggctccagatttatcagcaataaaccagccagccggaagggccgagcgcagaagtggtcctgcaactttatccgcctccatccagtctattaattgttgccgggaagctagagtaagtagttcgccagttaatagtttgcgcaacgttgttgccattgctgcagggggggggggggggggggacttccattgttcattccacggacaaaaacagagaaaggaaacgacagaggccaaaaagcctcgctttcagcacctgtcgtttcctttcttttcagagggtattttaaataaaaacattaagttatgacgaagaagaacggaaacgccttaaaccggaaaattttcataaatagcgaaaacccgcgaggtcgccgccccgtaacctgtcggatcaccggaaaggacccgtaaagtgataatgattatcatctacatatcacaacgtgcgtggaggccatcaaaccacgtcaaataatcaattatgacgcaggtatcgtattaattgatctgcatcaacttaacgtaaaaacaacttcagacaatacaaatcagcgacactgaatacggggcaacctcatgtcccccccccccccccccctgcaggcatcgtggtgtcacgctcgtcgtttggtatggcttcattcagctccggttcccaacgatcaaggcgagttacatgatcccccatgttgtgcaaaaaagcggttagctccttcggtcctccgatcgttgtcagaagtaagttggccgcagtgttatcactcatggttatggcagcactgcataattctcttactgtcatgccatccgtaagatgcttttctgtgactggtgagtactcaaccaagtcattctgagaatagtgtatgcggcgaccgagttgctcttgcccggcgtcaacacgggataataccgcgccacatagcagaactttaaaagtgctcatcattggaaaacgttcttcggggcgaaaactctcaaggatcttaccgctgttgagatccagttcgatgtaacccactcgtgcacccaactgatcttcagcatcttttactttcaccagcgtttctgggtgagcaaaaacaggaaggcaaaatgccgcaaaaaagggaataagggcgacacggaaatgttgaatactcatactcttcctttttcaatattattgaagcatttatcagggttattgtctcatgagcggatacatatttgaatgtatttagaaaaataaacaaataggggttccgcgcacatttccccgaaaagtgccacctgacgtctaagaaaccattattatcatgacattaacctataaaaataggcgtatcacgaggccctttcgtcttcaagaattcggagcttttgccattctcaccggattcagtcgtcactcatggtgatttctcacttgataaccttatttttgacgaggggaaattaataggttgtattgatgttggacgagtcggaatcgcagaccgataccaggatcttgccatcctatggaactgcctcggtgagttttctccttcattacagaaacggctttttcaaaaatatggtattgataatcctgatatgaataaattgcagtttcatttgatgctcgatgagtttttctaatcagaattggttaattggttgtaacactggcagagcattacgctgacttgacgggacggcggctttgttgaataaatcgaacttttgctgagttgaaggatcagatcacgcatcttcccgacaacgcagaccgttccgtggcaaagcaaaagttcaaaatcaccaactggtccacctacaacaaagctctcatcaaccgtggctccctcactttctggctggatgatggggcgattcaggcctggtatgagtcagcaacaccttcttcacgaggcagacctcagcgccagaaggccgccagagaggccgagcgcggccgtgaggcttggacgctagggcagggcatgaaaaagcccgtagcgggctgctacgggcgtctgacgcggtggaaagggggaggggatgttgtctacatggctctgctgtagtgagtgggttgcgctccggcagcggtcctgatcaatcgtcaccctttctcggtccttcaacgttcctgacaacgagcctccttttcgccaatccatcgacaatcaccgcgagtccctgctcgaacgctgcgtccggaccggcttcgtcgaaggcgtctatcgcggcccgcaacagcggcgagagcggagcctgttcaacggtgccgccgcgctcgccggcatcgctgtcgccggcctgctcctcaagcacggccccaacagtgaagtagctgattgtcatcagcgcattgacggcgtccccggccgaaaaacccgcctcgcagaggaagcgaagctgcgcgtcggccgtttccatctgcggtgcgcccggtcgcgtgccggcatggatgcgcgcgccatcgcggtaggcgagcagcgcctgcctgaagctgcgggcattcccgatcagaaatgagcgccagtcgtcgtcggctctcggcaccgaatgcgtatgattctccgccagcatggcttcggccagtgcgtcgagcagcgcccgcttgttcctgaagtgccagtaaagcgccggctgctgaacccccaaccgttccgccagtttgcgtgtcgtcagaccgtctacgccgacctcgttcaacaggtccagggcggcacggatcactgtattcggctgcaactttgtcatgcttgacactttatcactgataaacataatatgtccaccaacttatcagtgataaagaatccgcgcgttcaatcggaccagcggaggctggtccggaggccagacgtgaaacccaacatacccctgatcgtaattctgagcactgtcgcgctcgacgctgtcggcatcggcctgattatgccggtgctgccgggcctcctgcgcgatctggttcactcgaacgacgtcaccgcccactatggcattctgctggcgctgtatgcgttggtgcaatttgcctgcgcacctgtgctgggcgcgctgtcggatcgtttcgggcggcggccaatcttgctcgtctcgctggccggcgccactgtcgactacgccatcatggcgacagcgcctttcctttgggttctctatatcgggcggatcgtggccggcatcaccggggcgactggggcggtagccggcgcttatattgccgatatcactgatggcgatgagcgcgcgcggcacttcggcttcatgagcgcctgtttcgggttcgggatggtcgcgggacctgtgctcggtgggctgatgggcggtttctccccccacgctccgttcttcgccgcggcagccttgaacggcctcaatttcctgacgggctgtttccttttgccggagtcgcacaaaggcgaacgccggccgttacgccgggaggctctcaacccgctcgcttcgttccggtgggcccggggcatgaccgtcgtcgccgccctgatggcggtcttcttcatcatgcaacttgtcggacaggtgccggccgcgctttgggtcattttcggcgaggatcgctttcactgggacgcgaccacgatcggcatttcgcttgccgcatttggcattctgcattcactcgcccaggcaatgatcaccggccctgtagccgcccggctcggcgaaaggcgggcactcatgctcggaatgattgccgacggcacaggctacatcctgcttgccttcgcgacacggggatggatggcgttcccgatcatggtcctgcttgcttcgggtggcatcggaatgccggcgctgcaagcaatgttgtccaggcaggtggatgaggaacgtcaggggcagctgcaaggctcactggcggcgctcaccagcctgacctcgatcgtcggacccctcctcttcacggcgatctatgcggcttctataacaacgtggaacgggtgggcatggattgcaggcgctgccctctacttgctctgcctgccggcgctgcgtcgcgggctttggagcggcgcagggcaacgagccgatcgctgatcgtggaaacgataggcctatgccatgcgggtcaaggcgacttccggcaagctatacgcgccctaggagtgcggttggaacgttggcccagccagatactcccgatcacgagcaggacgccgatgatttgaagcgcactcagcgtctgatccaagaacaaccatcctagcaacacggcggtccccgggctgagaaagcccagtaaggaaacaactgtaggttcgagtcgcgagatcccccggaaccaaaggaagtaggttaaacccgctccgatcaggccgagccacgccaggccgagaacattggttcctgtaggcatcgggattggcggatcaaacactaaagctactggaacgagcagaagtcctccggccgccagttgccaggcggtaaaggtgagcagaggcacgggaggttgccacttgcgggtcagcacggttccgaacgccatggaaaccgcccccgccaggcccgctgcgacgccgacaggatctagcgctgcgtttggtgtcaacaccaacagcgccacgcccgcagttccgcaaatagcccccaggaccgccatcaatcgtatcgggctacctagcagagcggcagagatgaacacgaccatcagcggctgcacagcgcctaccgtcgccgcgaccccgcccggcaggcggtagaccgaaataaacaacaagctccagaatagcgaaatattaagtgcgccgaggatgaagatgcgcatccaccagattcccgttggaatctgtcggacgatcatcacgagcaataaacccgccggcaacgcccgcagcagcataccggcgacccctcggcctcgctgttcgggctccacgaaaacgccggacagatgcgccttgtgagcgtccttggggccgtcctcctgtttgaagaccgacagcccaatgatctcgccgtcgatgtaggcgccgaatgccacggcatctcgcaaccgttcagcgaacgcctccatgggctttttctcctcgtgctcgtaaacggacccgaacatctctggagctttcttcagggccgacaatcggatctcgcggaaatcctgcacgtcggccgctccaagccgtcgaatctgagccttaatcacaattgtcaattttaatcctctgtttatcggcagttcgtagagcgcgccgtgcgtcccgagcgatactgagcgaagcaagtgcgtcgagcagtgcccgcttgttcctgaaatgccagtaaagcgctggctgctgaacccccagccggaactgaccccacaaggccctagcgtttgcaatgcaccaggtcatcattgacccaggcgtgttccaccaggccgctgcctcgcaactcttcgcaggcttcgccgacctgctcgcgccacttcttcacgcgggtggaatccgatccgcacatgaggcggaaggtttccagcttgagcgggtacggctcccggtgcgagctgaaatagtcgaacatccgtcgggccgtcggcgacagcttgcggtacttctcccatatgaatttcgtgtagtggtcgccagcaaacagcacgacgatttcctcgtcgatcaggacctggcaacgggacgttttcttgccacggtccaggacgcggaagcggtgcagcagcgacaccgattccaggtgcccaacgcggtcggacgtgaagcccatcgccgtcgcctgtaggcgcgacaggcattcctcggccttcgtgtaataccggccattgatcgaccagcccaggtcctggcaaagctcgtagaacgtgaaggtgatcggctcgccgataggggtgcgcttcgcgtactccaacacctgctgccacaccagttcgtcatcgtcggcccgcagctcgacgccggtgtaggtgatcttcacgtccttgttgacgtggaaaatgaccttgttttgcagcgcctcgcgcgggattttcttgttgcgcgtggtgaacagggcagagcgggccgtgtcgtttggcatcgctcgcatcgtgtccggccacggcgcaatatcgaacaaggaaagctgcatttccttgatctgctgcttcgtgtgtttcagcaacgcggcctgcttggcctcgctgacctgttttgccaggtcctcgccggcggtttttcgcttcttggtcgtcatagttcctcgcgtgtcgatggtcatcgacttcgccaaacctgccgcctcctgttcgagacgacgcgaacgctccacggcggccgatggcgcgggcagggcagggggagccagttgcacgctgtcgcgctcgatcttggccgtagcttgctggaccatcgagccgacggactggaaggtttcgcggggcgcacgcatgacggtgcggcttgcgatggtttcggcatcctcggcggaaaaccccgcgtcgatcagttcttgcctgtatgccttccggtcaaacgtccgattcattcaccctccttgcgggattgccccgactcacgccggggcaatgtgcccttattcctgatttgacccgcctggtgccttggtgtccagataatccaccttatcggcaatgaagtcggtcccgtagaccgtctggccgtccttctcgtacttggtattccgaatcttgccctgcacgaataccagcgaccccttgcccaaatacttgccgtgggcctcggcctgagagccaaaacacttgatgcggaagaagtcggtgcgctcctgcttgtcgccggcatcgttgcgccactcttcattaaccgctatatcgaaaattgcttgcggcttgttagaattgccatgacgtacctcggtgtcacgggtaagattaccgataaactggaactgattatggctcatatcgaaagtctccttgagaaaggagactctagtttagctaaacattggttccgctgtcaagaactttagcggctaaaattttgcgggccgcgaccaaaggtgcgaggggcggcttccgctgtgtacaaccagatatttttcaccaacatccttcgtctgctcgatgagcggggcatgacgaaacatgagctgtcggagagggcaggggtttcaatttcgtttttatcagacttaaccaacggtaaggccaacccctcgttgaaggtgatggaggccattgccgacgccctggaaactcccctacctcttctcctggagtccaccgaccttgaccgcgaggcactcgcggagattgcgggtcatcctttcaagagcagcgtgccgcccggatacgaacgcatcagtgtggttttgccgtcacataaggcgtttatcgtaaagaaatggggcgacgacacccgaaaaaagctgcgtggaaggctctgacgccaagggttagggcttgcacttccttctttagccgctaaaacggccccttctctgcgggccgtcggctcgcgcatcatatcgacatcctcaacggaagccgtgccgcgaatggcatcgggcgggtgcgctttgacagttgttttctatcagaacccctacgtcgtgcggttcgattagctgtttgtcttgcaggctaaacactttcggtatatcgtttgcctgtgcgataatgttgctaatgatttgttgcgtaggggttactgaaaagtgagcgggaaagaagagtttcagaccatcaaggagcgggccaagcgcaagctggaacgcgacatgggtgcggacctgttggccgcgctcaacgacccgaaaaccgttgaagtcatgctcaacgcggacggcaaggtgtggcacgaacgccttggcgagccgatgcggtacatctgcgacatgcggcccagccagtcgcaggcgattatagaaacggtggccggattccacggcaaagaggtcacgcggcattcgcccatcctggaaggcgagttccccttggatggcagccgctttgccggccaattgccgccggtcgtggccgcgccaacctttgcgatccgcaagcgcgcggtcgccatcttcacgctggaacagtacgtcgaggcgggcatcatgacccgcgagcaatacgaggtcattaaaagcgccgtcgcggcgcatcgaaacatcctcgtcattggcggtactggctcgggcaagaccacgctcgtcaacgcgatcatcaatgaaatggtcgccttcaacccgtctgagcgcgtcgtcatcatcgaggacaccggcgaaatccagtgcgccgcagagaacgccgtccaataccacaccagcatcgacgtctcgatgacgctgctgctcaagacaacgctgcgtatgcgccccgaccgcatcctggtcggtgaggtacgtggccccgaagcccttgatctgttgatggcctggaacaccgggcatgaaggaggtgccgccaccctgcacgcaaacaaccccaaagcgggcctgagccggctcgccatgcttatcagcatgcacccggattcaccgaaacccattgagccgctgattggcgaggcggttcatgtggtcgtccatatcgccaggacccctagcggccgtcgagtgcaagaaattctcgaagttcttggttacgagaacggccagtacatcaccaaaaccctgtaaggagtatttccaatgacaacggctgttccgttccgtctgaccatgaatcgcggcattttgttctaccttgccgtgttcttcgttctcgctctcgcgttatccgcgcatccggcgatggcctcggaaggcaccggcggcagcttgccatatgagagctggctgacgaacctgcgcaactccgtaaccggcccggtggccttcgcgctgtccatcatcggcatcgtcgtcgccggcggcgtgctgatcttcggcggcgaactcaacgccttcttccgaaccctgatcttcctggttctggtgatggcgctgctggtcggcgcgcagaacgtgatgagcaccttcttcggtcgtggtgccgaaatcgcggccctcggcaacggggcgctgcaccaggtgcaagtcgcggcggcggatgccgtgcgtgcggtagcggctggacggctcgcctaatcatggctctgcgcacgatccccatccgtcgcgcaggcaaccgagaaaacctgttcatgggtggtgatcgtgaactggtgatgttctcgggcctgatggcgtttgcgctgattttcagcgcccaagagctgcgggccaccgtggtcggtctgatcctgtggttcggggcgctctatgcgttccgaatcatggcgaaggccgatccgaagatgcggttcgtgtacctgcgtcaccgccggtacaagccgtattacccggcccgctcgaccccgttccgcgagaacaccaatagccaagggaagcaataccgatgatccaagcaattgcgattgcaatcgcgggcctcggcgcgcttctgttgttcatcctctttgcccgcatccgcgcggtcgatgccgaactgaaactgaaaaagcatcgttccaaggacgccggcctggccgatctgctcaactacgccgctgtcgtcgatgacggcgtaatcgtgggcaagaacggcagctttatggctgcctggctgtacaagggcgatgacaacgcaagcagcaccgaccagcagcgcgaagtagtgtccgcccgcatcaaccaggccctcgcgggcctgggaagtgggtggatgatccatgtggacgccgtgcggcgtcctgctccgaactacgcggagcggggcctgtcggcgttccctgaccgtctgacggcagcgattgaagaagagcgctcggtcttgccttgctcgtcggtgatgtacttcaccagctccgcgaagtcgctcttcttgatggagcgcatggggacgtgcttggcaatcacgcgcaccccccggccgttttagcggctaaaaaagtcatggctctgccctcgggcggaccacgcccatcatgaccttgccaagctcgtcctgcttctcttcgatcttcgccagcagggcgaggatcgtggcatcaccgaaccgcgccgtgcgcgggtcgtcggtgagccagagtttcagcaggccgcccaggcggcccaggtcgccattgatgcgggccagctcgcggacgtgctcatagtccacgacgcccgtgattttgtagccctggccgacggccagcaggtaggccgacaggctcatgccggccgccgccgccttttcctcaatcgctcttcgttcgtctggaaggcagtacaccttgataggtgggctgcccttcctggttggcttggtttcatcagccatccgcttgccctcatctgttacgccggcggtagccggccagcctcgcagagcaggattcccgttgagcaccgccaggtgcgaataagggacagtgaagaaggaacacccgctcgcgggtgggcctacttcacctatcctgcccggctgacgccgttggatacaccaaggaaagtctacacgaaccctttggcaaaatcctgtatatcgtgcgaaaaaggatggatataccgaaaaaatcgctataatgaccccgaagcagggttatgcagcggaaaagcgctgcttccctgctgttttgtggaatatctaccgactggaaacaggcaaatgcaggaaattactgaactgaggggacaggcgagagacgatgccaaagagctacaccgacgagctggccgagtgggttgaatcccgcgcggccaagaagcgccggcgtgatgaggctgcggttgcgttcctggcggtgagggcggatgtcgaggcggcgttagcgtccggctatgcgctcgtcaccatttgggagcacatgcgggaaacggggaaggtcaagttctcctacgagacgttccgctcgcacgccaggcggcacatcaaggccaagcccgccgatgtgcccgcaccgcaggccaaggctgcggaacccgcgccggcacccaagacgccggagccacggcggccgaagcaggggggcaaggctgaaaagccggcccccgctgcggccccgaccggcttcaccttcaacccaacaccggacaaaaaggatctactgtaatggcgaaaattcacatggttttgcagggcaagggcggggtcggcaagtcggccatcgccgcgatcattgcgcagtacaagatggacaaggggcagacacccttgtgcatcgacaccgacccggtgaacgcgacgttcgagggctacaaggccctgaacgtccgccggctgaacatcatggccggcgacgaaattaactcgcgcaacttcgacaccctggtcgagctgattgcgccgaccaaggatgacgtggtgatcgacaacggtgccagctcgttcgtgcctctgtcgcattacctcatcagcaaccaggtgccggctctgctgcaagaaatggggcatgagctggtcatccataccgtcgtcaccggcggccaggctctcctggacacggtgagcggcttcgcccagctcgccagccagttcccggccgaagcgcttttcgtggtctggctgaacccgtattgggggcctatcgagcatgagggcaagagctttgagcagatgaaggcgtacacggccaacaaggcccgcgtgtcgtccatcatccagattccggccctcaaggaagaaacctacggccgcgatttcagcgacatgctgcaagagcggctgacgttcgaccaggcgctggccgatgaatcgctcacgatcatgacgcggcaacgcctcaagatcgtgcggcgcggcctgtttgaacagctcgacgcggcggccgtgctatgagcgaccagattgaagagctgatccgggagattgcggccaagcacggcatcgccgtcggccgcgacgacccggtgctgatcctgcataccatcaacgcccggctcatggccgacagtgcggccaagcaagaggaaatccttgccgcgttcaaggaagagctggaagggatcgcccatcgttggggcgaggacgccaaggccaaagcggagcggatgctgaacgcggccctggcggccagcaaggacgcaatggcgaaggtaatgaaggacagcgccgcgcaggcggccgaagcgatccgcagggaaatcgacgacggccttggccgccagctcgcggccaaggtcgcggacgcgcggcgcgtggcgatgatgaacatgatcgccggcggcatggtgttgttcgcggccgccctggtggtgtgggcctcgttatgaatcgcagaggcgcagatgaaaaagcccggcgttgccgggctttgtttttgcgttagctgggcttgtttgacaggcccaagctctgactgcgcccgcgctcgcgctcctgggcctgtttcttctcctgctcctgcttgcgcatcagggcctggtgccgtcgggctgcttcacgcatcgaatcccagtcgccggccagctcgggatgctccgcgcgcatcttgcgcgtcgccagttcctcgatcttgggcgcgtgaatgcccatgccttccttgatttcgcgcaccatgtccagccgcgtgtgcagggtctgcaagcgggcttgctgttgggcctgctgctgctgccaggcggcctttgtacgcggcagggacagcaagccgggggcattggactgtagctgctgcaaacgcgcctgctgacggtctacgagctgttctaggcggtcctcgatgcgctccacctggtcatgctttgcctgcacgtagagcgcaagggtctgctggtaggtctgctcgatgggcgcggattctaagagggcctgctgttccgtctcggcctcctgggccgcctgtagcaaatcctcgccgctgttgccgctggactgctttactgccggggactgctgttgccctgctcgcgccgtcgtcgcagttcggcttgcccccactcgattgactgcttcatttcgagccgcagcgatgcgatctcggattgcgtcaacggacggggcagcgcggaggtgtccggcttctccttgggtgagtcggtcgatgccatagccaaaggtttccttccaaaatgcgtccattgctggaccgtgtttctcattgatgcccgcaagcatcttcggcttgaccgccaggtcaagcgcgccttcatgggcggtcatgacggacgccgccatgaccttgccgccgttgttctcgatgtagccgcgtaatgaggcaatggtgccgcccatcgtcagcgtgtcatcgacaacgatgtacttctggccggggatcacctccccctcgaaagtcgggttgaacgccaggcgatgatctgaaccggctccggttcgggcgaccttctcccgctgcacaatgtccgtttcgacctcaaggccaaggcggtcggccagaacgaccgccatcatggccggaatcttgttgttccccgccgcctcgacggcgaggactggaacgatgcggggcttgtcgtcgccgatcagcgtcttgagctgggcaacagtgtcgtccgaaatcaggcgctcgaccaaattaagcgccgcttccgcgtcgccctgcttcgcagcctggtattcaggctcgttggtcaaagaaccaaggtcgccgttgcgaaccaccttcgggaagtctccccacggtgcgcgctcggctctgctgtagctgctcaagacgcctccctttttagccgctaaaactctaacgagtgcgcccgcgactcaacttgacgctttcggcacttacctgtgccttgccacttgcgtcataggtgatgcttttcgcactcccgatttcaggtactttatcgaaatctgaccgggcgtgcattacaaagttcttccccacctgttggtaaatgctgccgctatctgcgtggacgatgctgccgtcgtggcgctgcgacttatcggccttttgggccatatagatgttgtaaatgccaggtttcagggccccggctttatctaccttctggttcgtccatgcgccttggttctcggtctggacaattctttgcccattcatgaccaggaggcggtgtttcattgggtgactcctgacggttgcctctggtgttaaacgtgtcctggtcgcttgccggctaaaaaaaagccgacctcggcagttcgaggccggctttccctagagccgggcgcgtcaaggttgttccatctattttagtgaactgcgttcgatttatcagttactttcctcccgctttgtgtttcctcccactcgtttccgcgtctagccgacccctcaacatagcggcctcttcttgggctgcctttgcctcttgccgcgcttcgtcacgctcggcttgcaccgtcgtaaagcgctcggcctgcctggccgcctcttgcgccgccaacttcctttgctcctggtgggcctcggcgtcggcctgcgccttcgctttcaccgctgccaactccgtgcgcaaactctccgcttcgcgcctggtggcgtcgcgctcgccgcgaagcgcctgcatttcctggttggccgcgtccagggtcttgcggctctcttctttgaatgcgcgggcgtcctggtgagcgtagtccagctcggcgcgcagctcctgcgctcgacgctccacctcgtcggcccgctgcgtcgccagcgcggcccgctgctcggctcctgccagggcggtgcgtgcttcggccagggcttgccgctggcgtgcggccagctcggccgcctcggcggcctgctgctctagcaatgtaacgcgcgcctgggcttcttccagctcgcgggcctgcgcctcgaaggcgtcggccagctccccgcgcacggcttccaactcgttgcgctcacgatcccagccggcttgcgctgcctgcaacgattcattggcaagggcctgggcggcttgccagagggcggccacggcctggttgccggcctgctgcaccgcgtccggcacctggactgccagcggggcggcctgcgccgtgcgctggcgtcgccattcgcgcatgccggcgctggcgtcgttcatgttgacgcgggcggccttacgcactgcatccacggtcgggaagttctcccggtcgccttgctcgaacagctcgtccgcagccgcaaaaatgcggtcgcgcgtctctttgttcagttccatgttggctccggtaattggtaagaataataatactcttacctaccttatcagcgcaagagtttagctgaacagttctcgacttaacggcaggttttttagcggctgaagggcaggcaaaaaaagccccgcacggtcggcgggggcaaagggtcagcgggaaggggattagcgggcgtcgggcttcttcatgcgtcggggccgcgcttcttgggatggagcacgacgaagcgcgcacgcgcatcgtcctcggccctatcggcccgcgtcgcggtcaggaacttgtcgcgcgctaggtcctccctggtgggcaccaggggcatgaactcggcctgctcgatgtaggtccactccatgaccgcatcgcagtcgaggccgcgttccttcaccgtctcttgcaggtcgcggtacgcccgctcgttgagcggctggtaacgggccaattggtcgtaaatggctgtcggccatgagcggcctttcctgttgagccagcagccgacgacgaagccggcaatgcaggcccctggcacaaccaggccgacgccgggggcaggggatggcagcagctcgccaaccaggaaccccgccgcgatgatgccgatgccggtcaaccagcccttgaaactatccggccccgaaacacccctgcgcattgcctggatgctgcgccggatagcttgcaacatcaggagccgtttcttttgttcgtcagtcatggtccgccctcaccagttgttcgtatcggtgtcggacgaactgaaatcgcaagagctgccggtatcggtccagccgctgtccgtgtcgctgctgccgaagcacggcgaggggtccgcgaacgccgcagacggcgtatccggccgcagcgcatcgcccagcatggccccggtcagcgagccgccggccaggtagcccagcatggtgctgttggtcgccccggccaccagggccgacgtgacgaaatcgccgtcattccctctggattgttcgctgctcggcggggcagtgcgccgcgccggcggcgtcgtggatggctcgggttggctggcctgcgacggccggcgaaaggtgcgcagcagctcgttatcgaccggctgcggcgtcggggccgccgccttgcgctgcggtcggtgttccttcttcggctcgcgcagcttgaacagcatgatcgcggaaaccagcagcaacgccgcgcctacgcctcccgcgatgtagaacagcatcggattcattcttcggtcctccttgtagcggaaccgttgtctgtgcggcgcgggtggcccgcgccgctgtctttggggatcagccctcgatgagcgcgaccagtttcacgtcggcaaggttcgcctcgaactcctggccgtcgtcctcgtacttcaaccaggcatagccttccgccggcggccgacggttgaggataaggcgggcagggcgctcgtcgtgctcgacctggacgatggcctttttcagcttgtccgggtccggctccttcgcgcccttttccttggcgtccttaccgtcctggtcgccgtcctcgccgtcctggccgtcgccggcctccgcgtcacgctcggcatcagtctggccgttgaaggcatcgacggtgttgggatcgcggcccttctcgtccaggaactcgcgcagcagcttgaccgtgccgcgcgtgatttcctgggtgtcgtcgtcaagccacgcctcgacttcctccgggcgcttcttgaaggccgtcaccagctcgttcaccacggtcacgtcgcgcacgcggccggtgttgaacgcatcggcgatcttctccggcaggtccagcagcgtgacgtgctgggtgatgaacgccggcgacttgccgatttccttggcgatatcgcctttcttcttgcccttcgccagctcgcggccaatgaagtcggcaatttcgcgcggggtcagctcgttgcgttgcaggttctcgataacctggtcggcttcgttgtagtcgttgtcgatgaacgccgggatggacttcttgccggcccacttcgagccacggtagcggcgggcgccgtgattgatgatatagcggcccggctgctcctggttctcgcgcaccgaaatgggtgacttcaccccgcgctctttgatcgtggcaccgatttccgcgatgctctccggggaaaagccggggttgtcggccgtccgcggctgatgcggatcttcgtcgatcaggtccaggtccagctcgatagggccggaaccgccctgagacgccgcaggagcgtccaggaggctcgacaggtcgccgatgctatccaaccccaggccggacggctgcgccgcgcctgcggcttcctgagcggccgcagcggtgtttttcttggtggtcttggcttgagccgcagtcattgggaaatctccatcttcgtgaacacgtaatcagccagggcgcgaacctctttcgatgccttgcgcgcggccgttttcttgatcttccagaccggcacaccggatgcgagggcatcggcgatgctgctgcgcaggccaacggtggccggaatcatcatcttggggtacgcggccagcagctcggcttggtggcgcgcgtggcgcggattccgcgcatcgaccttgctgggcaccatgccaaggaattgcagcttggcgttcttctggcgcacgttcgcaatggtcgtgaccatcttcttgatgccctggatgctgtacgcctcaagctcgatgggggacagcacatagtcggccgcgaagagggcggccgccaggccgacgccaagggtcggggccgtgtcgatcaggcacacgtcgaagccttggttcgccagggccttgatgttcgccccgaacagctcgcgggcgtcgtccagcgacagccgttcggcgttcgccagtaccgggttggactcgatgagggcgaggcgcgcggcctggccgtcgccggctgcgggtgcggtttcggtccagccgccggcagggacagcgccgaacagcttgcttgcatgcaggccggtagcaaagtccttgagcgtgtaggacgcattgccctgggggtccaggtcgatcacggcaacccgcaagccgcgctcgaaaaagtcgaaggcaagatgcacaagggtcgaagtcttgccgacgccgcctttctggttggccgtgaccaaagttttcatcgtttggtttcctgttttttcttggcgtccgcttcccacttccggacgatgtacgcctgatgttccggcagaaccgccgttacccgcgcgtacccctcgggcaagttcttgtcctcgaacgcggcccacacgcgatgcaccgcttgcgacactgcgcccctggtcagtcccagcgacgttgcgaacgtcgcctgtggcttcccatcgactaagacgccccgcgctatctcgatggtctgctgccccacttccagcccctggatcgcctcctggaactggctttcggtaagccgtttcttcatggataacacccataatttgctccgcgccttggttgaacatagcggtgacagccgccagcacatgagagaagtttagctaaacatttctcgcacgtcaacacctttagccgctaaaactcgtccttggcgtaacaaaacaaaagcccggaaaccgggctttcgtctcttgccgcttatggctctgcacccggctccatcaccaacaggtcgcgcacgcgcttcactcggttgcggatcgacactgccagcccaacaaagccggttgccgccgccgccaggatcgcgccgatgatgccggccacaccggccatcgcccaccaggtcgccgccttccggttccattcctgctggtactgcttcgcaatgctggacctcggctcaccataggctgaccgctcgatggcgtatgccgcttctccccttggcgtaaaacccagcgccgcaggcggcattgccatgctgcccgccgctttcccgaccacgacgcgcgcaccaggcttgcggtccagaccttcggccacggcgagctgcgcaaggacataatcagccgccgacttggctccacgcgcctcgatcagctcttgcactcgcgcgaaatccttggcctccacggccgccatgaatcgcgcacgcggcgaaggctccgcagggccggcgtcgtgatcgccgccgagaatgcccttcaccaagttcgacgacacgaaaatcatgctgacggctatcaccatcatgcagacggatcgcacgaacccgctgaattgaacacgagcacggcacccgcgaccactatgccaagaatgcccaaggtaaaaattgccggccccgccatgaagtccgtgaatgccccgacggccgaagtgaagggcaggccgccacccaggccgccgccctcactgcccggcacctggtcgctgaatgtcgatgccagcacctgcggcacgtcaatgcttccgggcgtcgcgctcgggctgatcgcccatcccgttactgccccgatcccggcaatggcaaggactgccagcgctgccatttttggggtgaggccgttcgcggccgaggggcgcagcccctggggggatgggaggcccgcgttagcgggccgggagggttcgagaagggggggcaccccccttcggcgtgcgcggtcacgcgcacagggcgcagccctggttaaaaacaaggtttataaatattggtttaaaagcaggttaaaagacaggttagcggtggccgaaaaacgggcggaaacccttgcaaatgctggattttctgcctgtggacagcccctcaaatgtcaataggtgcgcccctcatctgtcagcactctgcccctcaagtgtcaaggatcgcgcccctcatctgtcagtagtcgcgcccctcaagtgtcaataccgcagggcacttatccccaggcttgtccacatcatctgtgggaaactcgcgtaaaatcaggcgttttcgccgatttgcgaggctggccagctccacgtcgccggccgaaatcgagcctgcccctcatctgtcaacgccgcgccgggtgagtcggcccctcaagtgtcaacgtccgcccctcatctgtcagtgagggccaagttttccgcgaggtatccacaacgccggcggccgcggtgtctcgcacacggcttcgacggcgtttctggcgcgtttgcagggccatagacggccgccagcccagcggcgagggcaaccagcccggtgagcgtcggaaaggcgctggaagccccgtagcgacgcggagaggggcgagacaagccaagggcgcaggctcgatgcgcagcacgacatagccggttctcgcaaggacgagaatttccctgcggtgcccctcaagtgtcaatgaaagtttccaacgcgagccattcgcgagagccttgagtccacgctagatgagagctttgttgtaggtggaccagttggtgattttgaacttttgctttgccacggaacggtctgcgttgtcgggaagatgcgtgatctgatccttcaactcagcaaaagttcgatttattcaacaaagccacgttgtgtctcaaaatctctgatgttacattgcacaagataaaaatatatcatcatgaacaataaaactgtctgcttacataaacagtaatacaaggggtgttatgagccatattcaacgggaaacgtcttgctcgactctagagctcgttcctcgaggcctcgaggcctcgaggaacggtacctgcggggaagcttacaataatgtgtgttgttaagtcttgttgcctgtcatcgtctgactgactttcgtcataaatcccggcctccgtaacccagctttgggcaagctcacggatttgatccggcggaacgggaatatcgagatgccgggctgaacgctgcagttccagctttccctttcgggacaggtactccagctgattgattatctgctgaagggtcttggttccacctcctggcacaatgcgaatgattacttgagcgcgatcgggcatccaattttctcccgtcaggtgcgtggtcaagtgctacaaggcacctttcagtaacgagcgaccgtcgatccgtcgccgggatacggacaaaatggagcgcagtagtccatcgagggcggcgaaagcctcgccaaaagcaatacgttcatctcgcacagcctccagatccgatcgagggtcttcggcgtaggcagatagaagcatggatacattgcttgagagtattccgatggactgaagtatggcttccatcttttctcgtgtgtctgcatctatttcgagaaagcccccgatgcggcgcaccgcaacgcgaattgccatactatccgaaagtcccagcaggcgcgcttgataggaaaaggtttcatactcggccgatcgcagacgggcactcacgaccttgaacccttcaactttcagggatcgatgctggttgatggtagtctcactcgacgtggctctggtgtgttttgacatagcttcctccaaagaaagcggaaggtctggatactccagcacgaaatgtgcccgggtagacggatggaagtctagccctgctcaatatgaaatcaacagtacatttacagtcaatactgaatatacttgctacatttgcaattgtcttataacgaatgtgaaataaaaatagtgtaacaacgcttttactcatcgataatcacaaaaacatttatacgaacaaaaatacaaatgcactccggtttcacaggataggcgggatcagaatatgcaacttttgacgttttgttctttcaaagggggtgctggcaaaaccaccgcactcatgggcctttgcgctgctttggcaaatgacggtaaacgagtggccctctttgatgccgacgaaaaccggcctctgacgcgatggagagaaaacgccttacaaagcagtactgggatcctcgctgtgaagtctattccgccgacgaaatgccccttcttgaagcagcctatgaaaatgccgagctcgaaggatttgattatgcgttggccgatacgcgtggcggctcgagcgagctcaacaacacaatcatcgctagctcaaacctgcttctgatccccaccatgctaacgccgctcgacatcgatgaggcactatctacctaccgctacgtcatcgagctgctgttgagtgaaaatttggcaattcctacagctgttttgcgccaacgcgtcccggtcggccgattgacaacatcgcaacgcaggatgtcagagacgctagagagccttccagttgtaccgtctcccatgcatgaaagagatgcatttgccgcgatgaaagaacgcggcatgttgcatcttacattactaaacacgggaactgatccgacgatgcgcctcatagagaggaatcttcggattgcgatggaggaagtcgtggtcatttcgaaactgatcagcaaaatcttggaggcttgaagatggcaattcgcaagcccgcattgtcggtcggcgaagcacggcggcttgctggtgctcgacccgagatccaccatcccaacccgacacttgttccccagaagctggacctccagcacttgcctgaaaaagccgacgagaaagaccagcaacgtgagcctctcgtcgccgatcacatttacagtcccgatcgacaacttaagctaactgtggatgcccttagtccacctccgtccccgaaaaagctccaggtttttctttcagcgcgaccgcccgcgcctcaagtgtcgaaaacatatgacaacctcgttcggcaatacagtccctcgaagtcgctacaaatgattttaaggcgcgcgttggacgatttcgaaagcatgctggcagatggatcatttcgcgtggccccgaaaagttatccgatcccttcaactacagaaaaatccgttctcgttcagacctcacgcatgttcccggttgcgttgctcgaggtcgctcgaagtcattttgatccgttggggttggagaccgctcgagctttcggccacaagctggctaccgccgcgctcgcgtcattctttgctggagagaagccatcgagcaattggtgaagagggacctatcggaacccctcaccaaatattgagtgtaggtttgaggccgctggccgcgtcctcagtcaccttttgagccagataattaagagccaaatgcaattggctcaggctgccatcgtccccccgtgcgaaacctgcacgtccgcgtcaaagaaataaccggcacctcttgctgtttttatcagttgagggcttgacggatccgcctcaagtttgcggcgcagccgcaaaatgagaacatctatactcctgtcgtaaacctcctcgtcgcgtactcgactggcaatgagaagttgctcgcgcgatagaacgtcgcggggtttctctaaaaacgcgaggagaagattgaactcacctgccgtaagtttcacctcaccgccagcttcggacatcaagcgacgttgcctgagattaagtgtccagtcagtaaaacaaaaagaccgtcggtctttggagcggacaacgttggggcgcacgcgcaaggcaacccgaatgcgtgcaagaaactctctcgtactaaacggcttagcgataaaatcacttgctcctagctcgagtgcaacaactttatccgtctcctcaaggcggtcgccactgataattatgattggaatatcagactttgccgccagatttcgaacgatctcaagcccatcttcacgacctaaatttagatcaacaaccacgacatcgaccgtcgcggaagagagtactctagtgaactgggtgctgtcggctaccgcggtcactttgaaggcgtggatcgtaaggtattcgataataagatgccgcatagcgacatcgtcatcgataagaagaacgtgtttcaacggctcacctttcaatctaaaatctgaacccttgttcacagcgcttgagaaattttcacgtgaaggatgtacaatcatctccagctaaatgggcagttcgtcagaattgcggctgaccgcggatgacgaaaatgcgaaccaagtatttcaattttatgacaaaagttctcaatcgttgttacaagtgaaacgcttcgaggttacagctactattgattaaggagatcgcctatggtctcgccccggcgtcgtgcgtccgccgcgagccagatctcgcctacttcataaacgtcctcataggcacggaatggaatgatgacatcgatcgccgtagagagcatgtcaatcagtgtgcgatcttccaagctagcaccttgggcgctacttttgacaagggaaaacagtttcttgaatccttggattggattcgcgccgtgtattgttgaaatcgatcccggatgtcccgagacgacttcactcagataagcccatgctgcatcgtcgcgcatctcgccaagcaatatccggtccggccgcatacgcagacttgcttggagcaagtgctcggcgctcacagcacccagcccagcaccgttcttggagtagagtagtctaacatgattatcgtgtggaatgacgagttcgagcgtatcttctatggtgattagcctttcctggggggggatggcgctgatcaaggtcttgctcattgttgtcttgccgcttccggtagggccacatagcaacatcgtcagtcggctgacgacgcatgcgtgcagaaacgcttccaaatccccgttgtcaaaatgctgaaggatagcttcatcatcctgattttggcgtttccttcgtgtctgccactggttccacctcgaagcatcataacgggaggagacttctttaagaccagaaacacgcgagcttggccgtcgaatggtcaagctgacggtgcccgagggaacggtcggcggcagacagatttgtagtcgttcaccaccaggaagttcagtggcgcagagggggttacgtggtccgacatcctgctttctcagcgcgcccgctaaaatagcgatatcttcaagatcatcataagagacgggcaaaggcatcttggtaaaaatgccggcttggcgcacaaatgcctctccaggtcgattgatcgcaatttcttcagtcttcgggtcatcgagccattccaaaatcggcttcagaagaaagcgtagttgcggatccacttccatttacaatgtatcctatctctaagcggaaatttgaattcattaagagcggcggttcctcccccgcgtggcgccgccagtcaggcggagctggtaaacaccaaagaaatcgaggtcccgtgctacgaaaatggaaacggtgtcaccctgattcttcttcagggttggcggtatgttgatggttgccttaagggctgtctcagttgtctgctcaccgttattttgaaagctgttgaagctcatcccgccacccgagctgccggcgtaggtgctagctgcctggaaggcgccttgaacaacactcaagagcatagctccgctaaaacgctgccagaagtggctgtcgaccgagcccggcaatcctgagcgaccgagttcgtccgcgcttggcgatgttaacgagatcatcgcatggtcaggtgtctcggcgcgatcccacaacacaaaaacgcgcccatctccctgttgcaagccacgctgtatttcgccaacaacggtggtgccacgatcaagaagcacgatattgttcgttgttccacgaatatcctgaggcaagacacactttacatagcctgccaaatttgtgtcgattgcggtttgcaagatgcacggaattattgtcccttgcgttaccataaaatcggggtgcggcaagagcgtggcgctgctgggctgcagctcggtgggtttcatacgtatcgacaaatcgttctcgccggacacttcgccattcggcaaggagttgtcgtcacgcttgccttcttgtcttcggcccgtgtcgccctgaatggcgcgtttgctgaccccttgatcgccgctgctatatgcaaaaatcggtgtttcttccggccgtggctcatgccgctccggttcgcccctcggcggtagaggagcagcaggctgaacagcctcttgaaccgctggaggatccggcggcacctcaatcggagctggatgaaatggcttggtgtttgttgcgatcaaagttgacggcgatgcgttctcattcaccttcttttggcgcccacctagccaaatgaggcttaatgataacgcgagaacgacacctccgacgatcaatttctgagaccccgaaagacgccggcgatgtttgtcggagaccagggatccagatgcatcaacctcatgtgccgcttgctgactatcgttattcatcccttcgcccccttcaggacgcgtttcacatcgggcctcaccgtgcccgtttgcggcctttggccaacgggatcgtaagcggtgttccagatacatagtactgtgtggccatccctcagacgccaacctcgggaaaccgaagaaatctcgacatcgctccctttaactgaatagttggcaacagcttccttgccatcaggattgatggtgtagatggagggtatgcgtacattgcccggaaagtggaataccgtcgtaaatccattgtcgaagacttcgagtggcaacagcgaacgatcgccttgggcgacgtagtgccaattactgtccgccgcaccaagggctgtgacaggctgatccaataaattctcagctttccgttgatattgtgcttccgcgtgtagtctgtccacaacagccttctgttgtgcctcccttcgccgagccgccgcatcgtcggcggggtaggcgaattggacgctgtaatagagatcgggctgctctttatcgaggtgggacagagtcttggaacttatactgaaaacataacggcgcatcccggagtcgcttgcggttagcacgattactggctgaggcgtgaggacctggcttgccttgaaaaatagataatttccccgcggtagggctgctagatctttgctatttgaaacggcaaccgctgtcaccgtttcgttcgtggcgaatgttacgaccaaagtagctccaaccgccgtcgagaggcgcaccacttgatcgggattgtaagccaaataacgcatgcgcggatctagcttgcccgccattggagtgtcttcagcctccgcaccagtcgcagcggcaaataaacatgctaaaatgaaaagtgcttttctgatcatggttcgctgtggcctacgtttgaaacggtatcttccgatgtctgataggaggtgacaaccagacctgccgggttggttagtctcaatctgccgggcaagctggtcaccttttcgtagcgaactgtcgcggtccacgtactcaccacaggcattttgccgtcaacgacgagggtccttttatagcgaatttgctgcgtgcttggagttacatcatttgaagcgatgtgctcgacctccaccctgccgcgtttgccaagaatgacttgaggcgaactgggattgggatagttgaagaattgctggtaatcctggcgcactgttggggcactgaagttcgataccaggtcgtaggcgtactgagcggtgtcggcatcataactctcgcgcaggcgaacgtactcccacaatgaggcgttaacgacggcctcctcttgagttgcaggcaatcgcgagacagacacctcgctgtcaacggtgccgtccggccgtatccatagatatacgggcacaagcctgctcaacggcaccattgtggctatagcgaacgcttgagcaacatttcccaaaatcgcgatagctgcgacagctgcaatgagtttggagagacgtcgcgccgatttcgctcgcgcggtttgaaaggcttctacttccttatagtgctcggcaaggctttcgcgcgccactagcatggcatattcaggccccgtcatagcgtccacccgaattgccgagctgaagatctgacggagtaggctgccatcgccccacattcagcgggaagatcgggcctttgcagctcgctaatgtgtcgtttgtctggcagccgctcaaagcgacaactaggcacagcaggcaatacttcatagaattctccattgaggcgaatttttgcgcgacctagcctcgctcaacctgagcgaagcgacggtacaagctgctggcagattgggttgcgccgctccagtaactgcctccaatgttgccggcgatcgccggcaaagcgacaatgagcgcatcccctgtcagaaaaaacatatcgagttcgtaaagaccaatgatcttggccgcggtcgtaccggcgaaggtgattacaccaagcataagggtgagcgcagtcgcttcggttaggatgacgatcgttgccacgaggtttaagaggagaagcaagagaccgtaggtgataagttgcccgatccacttagctgcgatgtcccgcgtgcgatcaaaaatatatccgacgaggatcagaggcccgatcgcgagaagcactttcgtgagaattccaacggcgtcgtaaactccgaaggcagaccagagcgtgccgtaaaggacccactgtgccccttggaaagcaaggatgtcctggtcgttcatcggaccgatttcggatgcgattttctgaaaaacggcctgggtcacggcgaacattgtatccaactgtgccggaacagtctgcagaggcaagccggttacactaaactgctgaacaaagtttgggaccgtcttttcgaagatggaaaccacatagtcttggtagttagcctgcccaacaattagagcaacaacgatggtgaccgtgatcacccgagtgataccgctacgggtatcgacttcgccgcgtatgactaaaataccctgaacaataatccaaagagtgacacaggcgatcaatggcgcactcaccgcctcctggatagtctcaagcatcgagtccaagcctgtcgtgaaggctacatcgaagatcgtatgaatggccgtaaacggcgccggaatcgtgaaattcatcgattggacctgaacttgactggtttgtcgcataatgttggataaaatgagctcgcattcggcgaggatgcgggcggatgaacaaatcgcccagccttaggggagggcaccaaagatgacagcggtcttttgatgctccttgcgttgagcggccgcctcttccgcctcgtgaaggccggcctgcgcggtagtcatcgttaataggcttgtcgcctgtacattttgaatcattgcgtcatggatctgcttgagaagcaaaccattggtcacggttgcctgcatgatattgcgagatcgggaaagctgagcagacgtatcagcattcgccgtcaagcgtttgtccatcgtttccagattgtcagccgcaatgccagcgctgtttgcggaaccggtgatctgcgatcgcaacaggtccgcttcagcatcactacccacgactgcacgatctgtatcgctggtgatcgcacgtgccgtggtcgacattggcattcgcggcgaaaacatttcattgtctaggtccttcgtcgaaggatactgatttttctggttgagcgaagtcagtagtccagtaacgccgtaggccgacgtcaacatcgtaaccatcgctatagtctgagtgagattctccgcagtcgcgagcgcagtcgcgagcgtctcagcctccgttgccgggtcgctaacaacaaactgcgcccgcgcgggctgaatatatagaaagctgcaggtcaaaactgttgcaataagttgcgtcgtcttcatcgtttcctaccttatcaatcttctgcctcgtggtgacgggccatgaattcgctgagccagccagatgagttgccttcttgtgcctcgcgtagtcgagttgcaaagcgcaccgtgttggcacgccccgaaagcacggcgacatattcacgcatatcccgcagatcaaattcgcagatgacgcttccactttctcgtttaagaagaaacttacggctgccgaccgtcatgtcttcacggatcgcctgaaattccttttcggtacatttcagtccatcgacataagccgatcgatctgcggttggtgatggatagaaaatcttcgtcatacattgcgcaaccaagctggctcctagcggcgattccagaacatgctctggttgctgcgttgccagtattagcatcccgttgttttttcgaacggtcaggaggaatttgtcgacgacagtcgaaaatttagggtttaacaaataggcgcgaaactcatcgcagctcatcacaaaacggcggccgtcgatcatggctccaatccgatgcaggagatatgctgcagcgggagcgcatacttcctcgtattcgagaagatgcgtcatgtcgaagccggtaatcgacggatctaactttacttcgtcaacttcgccgtcaaatgcccagccaagcgcatggccccggcaccagcgttggagccgcgctcctgcgccttcggcgggcccatgcaacaaaaattcacgtaaccccgcgattgaacgcatttgtggatcaaacgagagctgacgatggataccacggaccagacggcggttctcttccggagaaatcccaccccgaccatcactctcgatgagagccacgatccattcgcgcagaaaatcgtgtgaggctgctgtgttttctaggccacgcaacggcgccaacccgctgggtgtgcctctgtgaagtgccaaatatgttcctcctgtggcgcgaaccagcaattcgccaccccggtccttgtcaaagaacacgaccgtacctgcacggtcgaccatgctctgttcgagcatggctagaacaaacatcatgagcgtcgtcttacccctcccgataggcccgaatattgccgtcatgccaacatcgtgctcatgcgggatatagtcgaaaggcgttccgccattggtacgaaatcgggcaatcgcgttgccccagtggcctgagctggcgccctctggaaagttttcgaaagagacaaaccctgcgaaattgcgtgaagtgattgcgccagggcgtgtgcgccacttaaaattccccggcaattgggaccaataggccgcttccataccaataccttcttggacaaccacggcacctgcatccgccattcgtgtccgagcccgcgcgcccctgtccccaagactattgagatcgtctgcatagacgcaaaggctcaaatgatgtgagcccataacgaattcgttgctcgcaagtgcgtcctcagcctcggataatttgccgatttgagtcacggctttatcgccggaactcagcatctggctcgatttgaggctaagtttcgcgtgcgcttgcgggcgagtcaggaacgaaaaactctgcgtgagaacaagtggaaaatcgagggatagcagcgcgttgagcatgcccggccgtgtttttgcagggtattcgcgaaacgaatagatggatccaacgtaactgtcttttggcgttctgatctcgagtcctcgcttgccgcaaatgactctgtcggtataaatcgaagcgccgagtgagccgctgacgaccggaaccggtgtgaaccgaccagtcatgatcaaccgtagcgcttcgccaatttcggtgaagagcacaccctgcttctcgcggatgccaagacgatgcaggccatacgctttaagagagccagcgacaacatgccaaagatcttccatgttcctgatctggcccgtgagatcgttttccctttttccgcttagcttggtgaacctcctctttaccttccctaaagccgcctgtgggtagacaatcaacgtaaggaagtgttcattgcggaggagttggccggagagcacgcgctgttcaaaagcttcgttcaggctagcggcgaaaacactacggaagtgtcgcggcgccgatgatggcacgtcggcatgacgtacgaggtgagcatatattgacacatgatcatcagcgatattgcgcaacagcgtgttgaacgcacgacaacgcgcattgcgcatttcagtttcctcaagctcgaatgcaacgccatcaattctcgcaatggtcatgatcgatccgtcttcaagaaggacgatatggtcgctgaggtggccaatataagggagatagatctcaccggatctttcggtcgttccactcgcgccgagcatcacaccattcctctccctcgtgggggaaccctaattggatttgggctaacagtagcgcccccccaaactgcactatcaatgcttcttcccgcggtccgcaaaaatagcaggacgacgctcgccgcattgtagtctcgctccacgatgagccgggctgcaaaccataacggcacgagaacgacttcgtagagcgggttctgaacgataacgatgacaaagccggcgaacatcatgaataaccctgccaatgtcagtggcaccccaagaaacaatgcgggccgtgtggctgcgaggtaaagggtcgattcttccaaacgatcagccatcaactaccgccagtgagcgtttggccgaggaagctcgccccaaacatgataacaatgccgccgacgacgccggcaaccagcccaagcgaagcccgcccgaacatccaggagatcccgatagcgacaatgccgagaacagcgagtgactggccgaacggaccaaggataaacgtgcatatattgttaaccattgtggcggggtcagtgccgccacccgcagattgcgctgcggcgggtccggatgaggaaatgctccatgcaattgcaccgcacaagcttggggcgcagctcgatatcacgcgcatcatcgcattcgagagcgagaggcgatttagatgtaaacggtatctctcaaagcatcgcatcaatgcgcacctccttagtataagtcgaataagacttgattgtcgtctgcggatttgccgttgtcctggtgtggcggtggcggagcgattaaaccgccagcgccatcctcctgcgagcggcgctgatatgacccccaaacatcccacgtctcttcggattttagcgcctcgtgatcgtcttttggaggctcgattaacgcgggcaccagcgattgagcagctgtttcaacttttcgcacgtagccgtttgcaaaaccgccgatgaaattaccggtgttgtaagcggagatcgcccgacgaagcgcaaattgcttctcgtcaatcgtttcgccgcctgcataacgacttttcagcatgtttgcagcggcagataatgatgtgcacgcctggagcgcaccgtcaggtgtcagaccgagcatagaaaaatttcgagagtttatttgcatgaggccaacatccagcgaatgccgtgcatcgagacggtgcctgacgacttgggttgcttggctgtgatcttgccagtgaagcgtttcgccggtcgtgttgtcatgaatcgctaaaggatcaaagcgactctccaccttagctatcgccgcaagcgtagatgtcgcaactgatggggcacacttgcgagcaacatggtcaaactcagcagatgagagtggcgtggcaaggctcgacgaacagaaggagaccatcaaggcaagagaaagcgaccccgatctcttaagcataccttatctccttagctcgcaactaacaccgcctctcccgttggaagaagtgcgttgttttatgttgaagattatcgggagggtcggttactcgaaaattttcaattgcttctttatgatttcaattgaagcgagaaacctcgcccggcgtcttggaacgcaacatggaccgagaaccgcgcatccatgactaagcaaccggatcgacctattcaggccgcagttggtcaggtcaggctcagaacgaaaatgctcggcgaggttacgctgtctgtaaacccattcgatgaacgggaagcttccttccgattgctcttggcaggaatattggcccatgcctgcttgcgctttgcaaatgctcttatcgcgttggtatcatatgccttgtccgccagcagaaacgcactctaagcgattatttgtaaaaatgtttcggtcatgcggcggtcatgggcttgacccgctgtcagcgcaagacggatcggtcaaccgtcggcatcgacaacagcgtgaatcttggtggtcaaaccgccacgggaacgtcccatacagccatcgtcttgatcccgctgtttcccgtcgccgcatgttggtggacgcggacacaggaactgtcaatcatgacgacattctatcgaaagccttggaaatcacactcagaatatgatcccagacgtctgcctcacgccatcgtacaaagcgattgtagcaggttgtacaggaaccgtatcgatcaggaacgtctgcccagggcgggcccgtccggaagcgccacaagatgacattgatcacccgcgtcaacgcgcggcacgcgacgcggcttatttgggaacaaaggactgaacaacagtccattcgaaatcggtgacatcaaagcggggacgggttatcagtggcctccaagtcaagcctcaatgaatcaaaatcagaccgatttgcaaacctgatttatgagtgtgcggcctaaatgatgaaatcgtccttctagatcgcctccgtggtgtagcaacacctcgcagtatcgccgtgctgaccttggccagggaattgactggcaagggtgctttcacatgaccgctcttttggccgcgatagatgatttcgttgctgctttgggcacgtagaaggagagaagtcatatcggagaaattcctcctggcgcgagagcctgctctatcgcgacggcatcccactgtcgggaacagaccggatcattcacgaggcgaaagtcgtcaacacatgcgttataggcatcttcccttgaaggatgatcttgttgctgccaatctggaggtgcggcagccgcaggcagatgcgatctcagcgcaacttgcggcaaaacatctcactcacctgaaaaccactagcgagtctcgcgatcagacgaaggccttttacttaacgacacaatatccgatgtctgcatcacaggcgtcgctatcccagtcaatactaaagcggtgcaggaactaaagattactgatgacttaggcgtgccacgaggcctgagacgacgcgcgtagacagttttttgaaatcattatcaaagtgatggcctccgctgaagcctatcacctctgcgccggtctgtcggagagatgggcaagcattattacggtcttcgcgcccgtacatgcattggacgattgcagggtcaatggatctgagatcatccagaggattgccgcccttaccttccgtttcgagttggagccagcccctaaatgagacgacatagtcgacttgatgtgacaatgccaagagagagatttgcttaacccgatttttttgctcaagcgtaagcctattgaagcttgccggcatgacgtccgcgccgaaagaatatcctacaagtaaaacattctgcacaccgaaatgcttggtgtagacatcgattatgtgaccaagatccttagcagtttcgcttggggaccgctccgaccagaaataccgaagtgaactgacgccaatgacaggaatcccttccgtctgcagataggtaccatcgatagatctgctgcctcgcgcgtttcggtgatgacggtgaaaacctctgacacatgcagctcccggagacggtcacagcttgtctgtaagcggatgccgggagcagacaagcccgtcagggcgcgtcagcgggtgttggcgggtgtcggggcgcagccatgacccagtcacgtagcgatagcggagtgtatactggcttaactatgcggcatcagagcagattgtactgagagtgcaccatatgcggtgtgaaataccgcacagatgcgtaaggagaaaataccgcatcaggcgctcttccgcttcctcgctcactgactcgctgcgctcggtcgttcggctgcggcgagcggtatcagctcactcaaaggcggtaatacggttatccacagaatcaggggataacgcaggaaagaacatgtgagcaaaaggccagcaaaaggccaggaaccgtaaaaaggccgcgttgctggcgtttttccataggctccgcccccctgacgagcatcacaaaaatcgacgctcaagtcagaggtggcgaaacccgacaggactataaagataccaggcgtttccccctggaagctccctcgtgcgctctcctgttccgaccctgccgcttaccggatacctgtccgcctttctcccttcgggaagcgtggcgctttctcatagctcacgctgtaggtatctcagttcggtgtaggtcgttcgctccaagctgggctgtgtgcacgaaccccccgttcagcccgaccgctgcgccttatccggtaactatcgtcttgagtccaacccggtaagacacgacttatcgccactggcagcagccactggtaacaggattagcagagcgaggtatgtaggcggtgctacagagttcttgaagtggtggcctaactacggctacactagaaggacagtatttggtatctgcgctctgctgaagccagttaccttcggaaaaagagttggtagctcttgatccggcaaacaaaccaccgctggtagcggtggtttttttgtttgcaagcagcagattacgcgcagaaaaaaaggatctcaagaagatcctttgatcttttctacggggtctgacgctcagtggaacgaaaactcacgttaagggattttggtcatgagattatcaaaaaggatcttcacctagatccttttaaattaaaaatgaagttttaaatcaatctaaagtatatatgagtaaacttggtctgacagttaccaatgcttaatcagtgaggcacctatctcagcgatctgtctatttcgttcatccatagttgcctgactccccgtcgtgtagataactacgatacgggagggcttaccatctggccccagtgctgcaatgataccgcgagacccacgctcaccggctccagatttatcagcaataaaccagccagccggaagggccgagcgcagaagtggtcctgcaactttatccgcctccatccagtctattaattgttgccgggaagctagagtaagtagttcgccagttaatagtttgcgcaacgttgttgccattgctgcaggggggggggggggggggttccattgttcattccacggacaaaaacagagaaaggaaacgacagaggccaaaaagctcgctttcagcacctgtcgtttcctttcttttcagagggtattttaaataaaaacattaagttatgacgaagaagaacggaaacgccttaaaccggaaaattttcataaatagcgaaaacccgcgaggtcgccgccccgtaacctgtcggatcaccggaaaggacccgtaaagtgataatgattatcatctacatatcacaacgtgcgtggaggccatcaaaccacgtcaaataatcaattatgacgcaggtatcgtattaattgatctgcatcaacttaacgtaaaaacaacttcagacaatacaaatcagcgacactgaatacggggcaacctcatgtcccccccccccccccccctgcaggcatcgtggtgtcacgctcgtcgtttggtatggcttcattcagctccggttcccaacgatcaaggcgagttacatgatcccccatgttgtgcaaaaaagcggttagctccttcggtcctccgatcgttgtcagaagtaagttggccgcagtgttatcactcatggttatggcagcactgcataattctcttactgtcatgccatccgtaagatgcttttctgtgactggtgagtactcaaccaagtcattctgagaatagtgtatgcggcgaccgagttgctcttgcccggcgtcaacacgggataataccgcgccacatagcagaactttaaaagtgctcatcattggaaaacgttcttcggggcgaaaactctcaaggatcttaccgctgttgagatccagttcgatgtaacccactcgtgcacccaactgatcttcagcatcttttactttcaccagcgtttctgggtgagcaaaaacaggaaggcaaaatgccgcaaaaaagggaataagggcgacacggaaatgttgaatactcatactcttcctttttcaatattattgaagcatttatcagggttattgtctcatgagcggatacatatttgaatgtatttagaaaaataaacaaataggggttccgcgcacatttccccgaaaagtgccacctgacgtctaagaaaccattattatcatgacattaacctataaaaataggcgtatcacgaggccctttcgtcttcaagaattggtcgacgatcttgctgcgttcggatattttcgtggagttcccgccacagacccggattgaaggcgagatccagcaactcgcgccagatcatcctgtgacggaactttggcgcgtgatgactggccaggacgtcggccgaaagagcgacaagcagatcacgcttttcgacagcgtcggatttgcgatcgaggatttttcggcgctgcgctacgtccgcgaccgcgttgagggatcaagccacagcagcccactcgaccttctagccgacccagacgagccaagggatctttttggaatgctgctccgtcgtcaggctttccgacgtttgggtggttgaacagaagtcattatcgtacggaatgccaagcactcccgaggggaaccctgtggttggcatgcacatacaaatggacgaacggataaaccttttcacgcccttttaaatatccgttattctaataaacgctcttttctcttag

SEQ ID NO: 11 - DNA, 61069 bp, artificial
  PHP38465
  misc_feature (987)..(987): n is a, c, g, or t
gtttacccgccaatatatcctgtcaaacactgatagtttaaactgaaggcgggaaacgacaatctgatcatgagcggagaattaagggagtcacgttatgacccccgccgatgacgcgggacaagccgttttacgtttggaactgacagaaccgcaacgttgaaggagccactcagcaagctggtacgattgtaatacgactcactatagggcgaattgagcgctgtttaaacgctcttcaactggaagagcggttaccagagctggtcacctttgtccaccaagatggaactgcggccgctcattaattaagtcaggcgcgcctctagttgaagacacgttcatgtcttcatcgtaagaagacactcagtagtcttcggccagaatggccatctggattcagcaggcctagaaggccatttaaatcctgaggatctggtcttcctaaggacccgggatatcgctatcaactttgtatagaaaagttgggccgaattcgagctcggtacggccagaatggcccggaccgggttaccgaattcgagctcggtaccgggcggccgaagctggccttctaggcccggaccgggtgacccggaccggaattcgagctccaccgcggtggcggccgcattcgcaaaacacacctagactagatttgttttgctaacccaattgatattaattatatatgattaatatttatatgtatatggatttggttaatgaaatgcatctggttcatcaaagaattataaagacacgtgacattcatttaggataagaaatatggatgatctctttctcttttattcagataactagtaattacacataacacacaactttgatgcccacattatagtgattagcatgtcactatgtgtgcatccttttatttcatacattaattaagttggccaatccagaagatggacaagcctaggtgggcctgctactatgatgtttagaattgcttcgagatcnccattattattaattacagcagatcactaacgatctatagtcaaaacattgcagcagaaccctaattatatatctgtacctcgtgatgcatgttgcagcaatatccctccctagctctgatatatatagggctagtttggaaactcgaatccccttcgtgattgaagggggttagagaagaaattagttcatttccatctcaatttcctccaatcccgaaggggatctgaggttcccaaagtagcctatagtgatatgttggtacatcatccaacacggcgccgcctagatggtaatcaccccccatcatccacctcccggccggcccccaaaattccggccgatcgagatcgattcggggagatctccgaccgatcaacgactggtctctctctgcaattttcagaaactccggaagccagccctcttgcttgcttggatcaattgaaactcgatcaggtccacagcacagcctgctgcatgcatgatgctggcttctggagtttctgaagatggcagggagggccattatgtctacgatattaactgatccggggtgtgggtacggtggtgtcctagcaaatctgggggacggatccatggcggcggcggccggggagtgggccgggaagcgcgaacgaagctggagatggttggaccggcgcggcgtgttgctcgtgctgctcctctgctgcgagttgattgatcaatgcagggcgccggccggtggcttcaaatagggatggggagttggcgagtgtgtggtcggcgtgtgcaacgggattggaaaggcatgcatgtgatcggcggtaagggtagccgagacgtgcgcgcggctgtggctacgctgcttttggctgggatcgctgctgtggacgtactttgtcactgcgcacttgcctgcttgtgttattccgctggctaatattgcctgtttgcaggacgtggagaggggtgtctgctagtgctagctagtggtaaggatggggacgatgcttcaaataactcctcgtgttcttctctagtctaactaaacgaactaaattaaaaaaataagaaagaaattgtttatttagtttattaagttagactagagaaaaaccgcgcaagtatgcatttagagtaccatcttcattcttagctagtggtaaccgcaaaggggaccgggagagctgcggcgcaccttgctcctggatcgtttttggcttggctttgctgctgttaacgtgctttgtcactgctcacctgccttcttgtgttattcggttggctgatgggtttgcaggatggggagaggggtgtctgtttgcagtcaaggccggattctggggatcggtagaatttggaggtttgcttgcacgcgatgtggagagaggtgtctgttagcaacggaggatgcatggcgctggaggaaggctttgcagggtgtggaggagagggtgcctgttatccagtaatgttaatgttaggaacatagatgtcctatatccatgtaaactgtggaaacagaacttaatttccttaggagaccgggaaacaaaaaatgaacttgtggttaaggatatggactataattttgtggttcaaagaaaggtattggtatacatggctgccgtagggataagggtcatacatggctgccgtagggataagggtgttgttactctaccaagggcaccatacaggtggctgcacagcattcaggcgctgccaaatctagcgcgcacatcactgggtcaagccgacacagatttggacaatacgatgtgtagcagctggtggtggtgaagatatgcggatttaagagagaggtggatttgggttgggaggagcaacttgcatcgtcgtggatctccacacaaaaaagaagaattggaaatgtataatactatacatatgcttaaatgaaagtatttactgaattgtggatcgatgcattaattgtcatcacaagtgaaaattaggtaataatgagtactagttaatagttgagcacggaaaaagcaagcttggatccgatatcgatgggccctggccgaagcttggtcacccggtccgggcctagaaggccagcttcaagtttgtacaaaaaagcaggctccggccagaatggcccggaccgggttaccgaattcgagctcggtaccaggtttcgaggaagaagccacgaagtgtgtttgatactacatgtgttcaggaaactacatgtatatgtttaatactaatatgatgtggaattttacaatggacagtgtcactaggctttgtcgtttacgaattaccatcttagtctctatgattaggtgaagtgtttagaaacttttccatatagtctaggcttgctctttgggatcatgcgaggagccacttaaataaatttaagagtaaaatattatgtaaagtatgagtccaaaatcaatttttcttgacgaaattattctattattttgttccttataagtctagtcaactgtcgtaaatcagtataccttagacgataagcctaaattgattacgaaaggtgcttgattcttaattggttgtccatcaacgttgaaacgtattttctcaagtaaatacatcttttgagaaaacatatacaacttaggatgacatatcttgcgacttgcatgaaggcaggttacaattacgtttcaagctaagattttctctaaatcggtagtaggaaagttttaacggtcgctgaaagtttatgtttttatcgactgaccggatcaaccgataattaaaaaaattattttgaaaatttgatgtcacaaataaataagaaatttgaatttttttttatagagtttttgcatagtaatctttgtattttacttttttttttaaatcatgtttagacaaatagaaatggcatgaataatatgtgagatattgaaagtgattagtttgaatgaaattaattttaagaaacttgagtttgattgtttttctttaggcaatacaaaatttgatttggagtgcaaataaaatgtcgtcttgtttagtatgctcggactcttagataagcatgcttacctctttggaatgacgtcaatttggatgattttatatacgttcgcaatgacgtcgactgaatcattttatacgattatagtcatgattaaactagactcagttggtaagtatgaaaaaatgggtctaaattaacgtggcacacctaaagattcggtactaaaataaagaaaacctagctaggaaaactaaatatctcaagcatacaatttttattttcttggatgatgatgtcaatgcaggtcatttatgtattaagtattaaccaatactagctagggtttcgaatccaacaagtcagtttctcatctcacggacaatcatgaacttgagcttgaaaaggctcattataaacaaagtaatagcccaaatcataagtggcggaaagattaagagtagtcctggacgttcggttatctaattcggctttggttcgtatacattcggttatcgtttttttttgttctaaagtttagtatttattcgatttttgaaattttggttcgattttggttttgttccagttttttcggttttaaaatttggtatccattcggttattttgctttgaatattttgggatatttcggttgtttttgaatatttgtggttattttcgagtatttttactattttatataaatttttaagtatttttaattatttaatctagaaattattaatatttttgacaatataattatatttcggatatttttggttacattaaatattttgattcggtttcagttctttcagttataggatttagttttcattcggttatttttaaattttcggtttggttcgattatttttgctttggttttggtcgggtacatacagtttgaattatttgcccacacctaattaagagcatcaactaaagataatcatgagtcttgggctttacaaggcccattaagatcaaagtgaaatgcccaaatcatatatggcaaccagtggaaagcttaagagcatcatcaactaaacaagagccattttctcagttgtttattcattttctccatcgtacatagaaagagacaactagtcataactccaattttttgaaccttcccactccaacaatgccgattcaagtagcgagagcttaacaatcagcaataatggtagaaaaacgagtaggtccaaagatatgcaagactcggaataactttcagtttctgagtaacacaaagtattgatgatggattgtgttattcaccatgaaagtaacggatagagaaatgttgcttgagaatgagactgacaaatcagactgtcatattcttgtgggttttctctatgcaggtgaaaccaaaagtacaagggtactatgtaccttcagcttagaaatgatgtgttttctacacttttctcttcttttttttcttttcatctcacatgaatcaaaaagagaaagcttaattacattaaaggttgatgtgatatttactttctaaatatttgctagaagaaattataatgataacattaaattaagttatagtcatttctatttcggttgtctcccactttctgctatgcttttacaacaacagttcaagatttggaatcgttttctttctccaccaatcgtagtaatacttctttttgtgtttgttgaaattttgcaagattctctcttcctctggttaatacacataacttacttggtaagcttggctgcattttcttttcaagcttttaatcaaagactcactagaaattgcaaaggcaaacataaaattatgtgatcaaactcctactgtgagtttttggttacaaacaaaagttaaaaacaaaagcttgatatttaaaagataaactcaacacatatgcatttgactggcgcacagaagacaattcaagacttgggaaaacagtgagccatcaaaatcgtcagataattcagggaatatattgaatgtggagatgtggtaatcacactattgcacacaaagagtggcaaacaagcggcgcccttggtttggtatagtaagagacaattgttttggactgtttgtgttgccatattcacaaaaatactattgagctatgtatgttaaacattatggtcaatgagtagtagtgaacattcaagtttttttttttttccacttcaagtttttcatcttattattatttttcgttgtgatgcagtagtacggcccatcttcaccagtagtatatcaaagccgaaacagatgacaaattgtttaacatgcacttggattattattgagagttgaaatacaaaggcccgttacaagcccaaacgaaggtacataaaagaaaagcagaaaatgaaaacgaaatcgatagggataagtttttccaactgacggaaacacaaactacaccaggtgaaatagatcacctcccaagtgcatgagacacgaaccaaccacttatcatcagatcacaaaaacctaggcgccctagccagtgttctgcatgccggcggcgatgcccttcatggtgaggatgagcgtgtcttccaggccgggcgggtactcgctcgcggggttcagcttgaccagtccggcgggcttgttctcgtcggcgaactccttggacagcggcggctggggcgtcaccttgaagttggggtcccttatccgcttcagcgtgtaggcctggaacacgttcagggtggtgatgtaggggttgcgcagcaccagcccctgcttcaggaatggatcgccttcaagaatatccttgtgcccagcgatctgcacaaagtggagtagtcagtcatcgatcaggaaccagacaccagacttttattcatacagtgaagtgaagtgaagtgcagtgcagtgagttgctggtttttgtacctggaggagaagctgctgtgtctccacgtatttgtccctgagctgcttcccaaagggcttgagttcttctgccacaagcagctcgtcatacaagccggcaatgccggggtctcccttggcgaaaaccatctccagcaggtccagggtgaccctgaagaatggccactcgttgtacatctctttgaggacctggaagttcttgacgtccttgtcgatggcgaacttgaatgcggcgccgactcccagccacacggggaggtggaacctggtctgggtccacgagaagatccaggggatggcgcgcagggtcgtgatgccgccgccgggcctcctcttggctggccggctgccgatgttcatcctcccgtactcggtctccggtgtagcctgatagtgagtgacgcacaaacgctcgaatgaatgaaaagaacgatcgacatggatgaattcgatcgtcacaaagcaatgggcaatggcagcataccgatctgaagtactcgacgaagcgcggctccttgacgacgacggagcggtactcctccgtggccacgaccgccatctcgtccatgagcttgcgccactcgggcttgggagagaccggcgggtgcatgccgtgctccagcgtggcggccgtgaagcgctgcagagtctggaagcacaggtgctcctccccgaagcagaactcgatgacctcgccctgcaccgtcacacggatggacccgttgatggtgtccggcggttgggacaggatggcaaggtgcgtgggcccgccacccctgcccacggtgcctccgcggccgtggaacaaggtgagcttgacgccgtagcgcttggccacctgcgccatctcctcctgcgccttgtacagctgccacgccgcggacaggcggccggcgtccttgccggagtcggagtagccgaccatgacctgctgcttgcccttgatccggtccatgtaccagtccaccgagaagaggcgctccacggacgcgggcgccgactgcaggtcggccagcctctcgaacagcggcaccacgggcagcggctggcgcacgccgcactcgcgctgcaggagctctacggcgagcacgtccgagggggccgtcgccatagagatgatgtaggggccgaagctgtcgggcgggagctccgcgaggacgtggaacgcgccgatgacgtcggcgatctcgtcggtctggggaaggtccgggggcagcagcgggcgcttgcccttcagctccgacagcagccactcctgcctcttgtcctcggaccactcgcggtacgacccgatgccgaggtgcgtggtgatggcgtcgatcacgtcggtgtgccgctccgactcctgccggatgtccagcttcaccagggagagcccgaacgtgaaaacctggcgcaggaggtccaggaggctcccgtccgcgatggccttgtcgccgcagtcacacagtgatttgtagcacagctcaagtggctcaaggaactgcatgcatgcacgacagtagtgattttttttttgttagttgcagtgctgatgtcatactatgaatatatataatatatatacatgacgatatttacctcttcgatactggtaaatgacgcttccgctgaaatctcgctcacgcctgacgcaagcagatggcgagcacgctcgcgtgtgttgtacagcttgtcccttacatggcctagtatcacccggtagggctcgtttggaggaatttgcttccagaattctgcgccagcaaatacacttcagaaaagatgccaaaagagccctcaaattaatttgaaaacactagtggagacttttgcaaaaggctgtacggcaggcaaaaattaagcaaacataaatgcttctgtttgtggttacctatgtaatacttggtaactttggaaccagacgaactgtggagctcttcggcacgaacacgaagctcatcgttgcagcgccacatagagagctacagatatatcagacgatgcatgcatgagagttctggtatggaccggagacagcaaaaaacagggcaagcaaaaaaatcatagagcattcaatcaaacaaatctgcagtatggatgtacagtacctcaaacatcagctcttcaatctgatcgatgtacaagtttgcagccatcattctggccagcaagcatacatctcttgtcacctccggggtaactcttggatttcctatatagcgatagattgcaaagatatacaggcttagaaaaaacatataattctgtatatataattttctggcgagaaaagaaaaacgttagccttgaatattgacaggacaagtactgatataatataagcactctttgatatataaaataatactacacgtataattctgtgatataaaaaattcaacaagttaggttccaggttgcaatataaagatttgattaaattatgcttatatgttgtgctagcatgtatggatgataaatttttattagtgaggtgtactaaataatttctattttaaaattctagctcctgagagctcgaaatgatagactagtttttctgaacatctattgcagtcagagtaaagcaggaaggtttctctcaagctgaaagacagagagctcctgccactttattgaaaagggtaggcagaaatgtaccatcgcggtcaccacccatccaagaagagaaccgaatgagagaaacattgtagggaaggcgctcattgatgccgatattcttcagggctgtatccacacggcgcaagaacttaggcacgcccttccatacagtctcatggatgtagctcatcccatagcgcatttcgtcctggggggtgggttgtgccctcctgatttcatcggttctgaaggctgcttggatctgtgaacacccaagaaaaggaattagaactaaacaacccaaacaacaaaaataccactttggtggcttgaagcagtaaacttctcaggtggtctgcatcatatatatgcaccatgagagagacgctctttaccgagtgctcagtgatgacattatgactcgtctgaaatttgtaacactaggaacttgagcatagcctagctaattgagggtgtggagttaaggctatctaggtttgattcctcatcaaggagaaactggatgccctacttgttaggaaaatataatgatgagtacaacaacttgattacaactaaaccattaatgcatctgtggtaccgaagttctactcaaatggctctatatgagtaagagatctttgtacaaaatgatcttttttaagtaaaaggaaaatgctttgagcacagctggagaatagcatataaataattcagtgtagttttcatcaagtggtcttcaacattgaatcttaagtcaagtcggcctcatataaataattctgttatacatgtagcagttctctcattgcattgttaaaacataaatgtgcagtctagttctttcctgattaggttagtttctactttggagtttgcaaagacagtttaaatagtggaaaagtttggttgtttattaccttagcttgataataatgaatatttatttatatgtgttttaatgggagaacctgacctgacttgacatataaattgaagatttctctggcgcactaacttacacgtgtcgtgctcgatgtcttgcaagctcatgagtccacgtgtactgtgcatgtgttctattctatctctatcaaagaatgaatgtctcttgataaagttcttgcattccctggtgtgaaatgtaatatgtacgtacctcgcgctgcaacgcttcgtccagctcctgcttgtcgtcgtcagtgatgtccttggcattcagctgggtcagacaattccggatcctgcagcgacaagaccgacatttttatttatcaaaaataataataatggttaagacttaagggtatataacgtgagtagcatatcgatcaagccattgaaaaatatatacccggcatttttttgcaggagcgagcggcgggcggactgtgtgggatgcgcggtgaagacgaggtcgatggtctggttcttgagcgcctcgaacacctcctcgggggacttgccgacctcggacacgaggcgcttgagcgtctcctcgatgtcggactcggtggtggcggagccctcgtcggcgaacccacctttcttgagcttgctgttgcggcggcggcgcgcgatctgcacctcctcggcgaggttggcgaggttgagcatgtgcaggatggagctcgccacgaggatggcgtcggcgggggccagccccgtgagcttggcgccgagctcgcccagcttcgtcgtgtctcctttgccctcgtagtcggctgagacctcgtagcactcctggacctgcatgcatgcattacagtaagcactggcggggagacgtacgagcagtgccgcgcgcaggcggcaaccggtcgaagaagaaatgggcggcggcagtggttagttacaaattcgcgaaggctgggcccgtggaggtcctggaggatgttgaggaagcggtcgacgagcagcgcatcgtactcgatgagcttgtcgtcctcggagaccttgcctgggaccagctgacggagctgcgcgtcgatggagtggtgcttctcgccggggccgggagccttggtcgacgccatggcgcggcgggaagctaagcacggaagcgagatggttggagcggcacggcgtgctgctcgtgctgctgcgatgcgattggtgatcaatgcagtgcgcgggtgggttcaaatagggatggggagtcgttggcgggcgggtgtgtgtgtggctgtgcacgggaacgggcggccctcggcgttcggaaaggcgcggccttgggcatgtgatcggcggtaaccgcaacggaaccggctgcggctgaggctcctttttggcttggcttgctgctgttagcggccggaggggatgtggagaggggtgtctgctactgctggcggcaatcgcaaggggacctggagagctgcggctgcggcttgggcttgctcctccttgctcctttttggcttggctcggtgctgttgacgtgctttgtcactgctcacctgccttcttgtgttattccgttggctaattgggtagcaggatgtggagagggcgtcccttagcagttaatgctggattcgggggatcgcaagaatttggaggaatgctttgcaggatgtggagagggcgtctgttagcaagtaggctgcatcggagtgaagaatctggagggatgtggcgagggtgtctgtttgcaggatgtggttgagggtgcagtgaggcggctgtggctaagagtcgtctttgtagataattttttgtttccattaacatttaaattaaatttatgattttaaaatttagtttcctaggaggataaggaaaaaaaaaagtgaacctgtggttaggaactcggcattttattgttccaaataagtgttcaacctgaacaagaagtgccgctataataaattattgtggttcaagaaaaagtatatttaattcttggtatgcatacatggctattgtagggataaggggtgtcattctacgaagggcaccatacatatagggataaggatgttgttctaccaagggcaccgtacaggtgtctcctccattggcgccgaccgtgcacaagccaacaaagatatgcacgatgcgatgtgttgttggcacttggcagcggtgaacatgcacggattgaagagagaggtggatttgggttgggatatccacacaaaaagaagaattttaaaatatagactgtgtgcttaaatgtacatatttacagaattatggtctaatgcatttgttatcacaattagaaatgagataatgctaggtaattgaaaatagaaaaaccatcgaatgaccttacatttatattagtagctaaccacgtgtcctaacaccattacatcgctagatcctcgacatactatcaacattgtgcattacatcgagctaagtaaagaactgatcggccaggatccgatatcgatgggccctggccgaagcttggtcacccggtccgggcctagaaggccgatctcccgggcacccagctttcttgtacaaagtggccgttaacggatcggccagaatggcccggaccgaagctggccgctctagaactagtggatctcgatgtgtagtctacgagaagggttaaccgtctcttcgtgagaataaccgtggcctaaaaataagccgatgaggataaataaaatgtggtggtacagtacttcaagaggtttactcatcaagaggatgcttttccgatgagctctagtagtacatcggacctcacatacctccattgtggtgaaatattttgtgctcatttagtgatgggtaaattttgtttatgtcactctaggttttgacatttcagttttgccactcttaggttttgacaaataatttccattccgcggcaaaagcaaaacaattttattttacttttaccactcttagctttcacaatgtatcacaaatgccactctagaaattctgtttatgccacagaatgtgaaaaaaaacactcacttatttgaagccaaggtgttcatggcatggaaatgtgacataaagtaacgttcgtgtataagaaaaaattgtactcctcgtaacaagagacggaaacatcatgagacaatcgcgtttggaaggctttgcatcacctttggatgatgcgcatgaatggagtcgtctgcttgctagccttcgcctaccgcccactgagtccgggcggcaactaccatcggcgaacgacccagctgacctctaccgaccggacttgaatgcgctaccttcgtcagcgacgatggccgcgtacgctggcgacgtgcccccgcatgcatggcggcacatggcgagctcagaccgtgcgtggctggctacaaatacgtaccccgtgagtgccctagctagaaacttacacctgcaactgcgagagcgagcgtgtgagtgtagccgagtagatcccccggtcgccaccatggcctcctccgagaacgtcatcaccgagttcatgcgcttcaaggtgcgcatggagggcaccgtgaacggccacgagttcgagatcgagggcgagggcgagggccgcccctacgagggccacaacaccgtgaagctgaaggtgaccaagggcggccccctgcccttcgcctgggacatcctgtccccccagttccagtacggctccaaggtgtacgtgaagcaccccgccgacatccccgactacaagaagctgtccttccccgagggcttcaagtgggagcgcgtgatgaacttcgaggacggcggcgtggcgaccgtgacccaggactcctccctgcaggacggctgcttcatctacaaggtgaagttcatcggcgtgaacttcccctccgacggccccgtgatgcagaagaagaccatgggctgggaggcctccaccgagcgcctgtacccccgcgacggcgtgctgaagggcgagacccacaaggccctgaagctgaaggacggcggccactacctggtggagttcaagtccatctacatggccaagaagcccgtgcagctgcccggctactactacgtggacgccaagctggacatcacctcccacaacgaggactacaccatcgtggagcagtacgagcgcaccgagggccgccaccacctgttcctgtagcggcccatggatattcgaacgcgtaggtaccacatggttaacctagacttgtccatcttctggattggccaacttaattaatgtatgaaataaaaggatgcacacatagtgacatgctaatcactataatgtgggcatcaaagttgtgtgttatgtgtaattactagttatctgaataaaagagaaagagatcatccatatttcttatcctaaatgaatgtcacgtgtctttataattctttgatgaaccagatgcatttcattaaccaaatccatatacatataaatattaatcatatataattaatatcaattgggttagcaaaacaaatctagtctaggtgtgttttgcgaatgcggccgccaccgcggtggagctcgaattccggtccgggcctagaaggccagcttcggccgccccgggcaactttattatacaaagttgatagatatcggaccgattaaactttaattcggtccgaagcttgcatgcctgcagtgcagcgtgacccggtcgtgcccctctctagagataatgagcattgcatgtctaagttataaaaaattaccacatattttttttgtcacacttgtttgaagtgcagtttatctatctttatacatatatttaaactttactctacgaataatataatctatagtactacaataatatcagtgttttagagaatcatataaatgaacagttagacatggtctaaaggacaattgagtattttgacaacaggactctacagttttatctttttagtgtgcatgtgttctcctttttttttgcaaatagcttcacctatataatacttcatccattttattagtacatccatttagggtttagggttaatggtttttatagactaatttttttagtacatctattttattctattttagcctctaaattaagaaaactaaaactctattttagtttttttatttaataatttagatataaaatagaataaaataaagtgactaaaaattaaacaaataccctttaagaaattaaaaaaactaaggaaacatttttcttgtttcgagtagataatgccagcctgttaaacgccgtcgacgagtctaacggacaccaaccagcgaaccagcagcgtcgcgtcgggccaagcgaagcagacggcacggcatctctgtcgctgcctctggacccctctcgagagttccgctccaccgttggacttgctccgctgtcggcatccagaaattgcgtggcggagcggcagacgtgagccggcacggcaggcggcctcctcctcctctcacggcaccggcagctacgggggattcctttcccaccgctccttcgctttcccttcctcgcccgccgtaataaatagacaccccctccacaccctctttccccaacctcgtgttgttcggagcgcacacacacacaaccagatctcccccaaatccacccgtcggcacctccgcttcaaggtacgccgctcgtcctcccccccccccctctctaccttctctagatcggcgttccggtccatgcatggttagggcccggtagttctacttctgttcatgtttgtgttagatccgtgtttgtgttagatccgtgctgctagcgttcgtacacggatgcgacctgtacgtcagacacgttctgattgctaacttgccagtgtttctctttggggaatcctgggatggctctagccgttccgcagacgggatcgatttcatgattttttttgtttcgttgcatagggtttggtttgcccttttcctttatttcaatatatgccgtgcacttgtttgtcgggtcatcttttcatgcttttttttgtcttggttgtgatgatgtggtctggttgggcggtcgttctagatcggagtagaattctgtttcaaactacctggtggatttattaattttggatctgtatgtgtgtgccatacatattcatagttacgaattgaagatgatggatggaaatatcgatctaggataggtatacatgttgatgcgggttttactgatgcatatacagagatgctttttgttcgcttggttgtgatgatgtggtgtggttgggcggtcgttcattcgttctagatcggagtagaatactgtttcaaactacctggtgtatttattaattttggaactgtatgtgtgtgtcatacatcttcatagttacgagtttaagatggatggaaatatcgatctaggataggtatacatgttgatgtgggttttactgatgcatatacatgatggcatatgcagcatctattcatatgctctaaccttgagtacctatctattataataaacaagtatgttttataattattttgatcttgatatacttggatgatggcatatgcagcagctatatgtggatttttttagccctgccttcatacgctatttatttgcttggtactgtttcttttgtcgatgctcaccctgttgtttggtgttacttctgcaggtcgactttaacttagcctaggatccacacgacaccatgtcccccgagcgccgccccgtcgagatccgcccggccaccgccgccgacatggccgccgtgtgcgacatcgtgaaccactacatcgagacctccaccgtgaacttccgcaccgagccgcagaccccgcaggagtggatcgacgacctggagcgcctccaggaccgctacccgtggctcgtggccgaggtggagggcgtggtggccggcatcgcctacgccggcccgtggaaggcccgcaacgcctacgactggaccgtggagtccaccgtgtacgtgtcccaccgccaccagcgcctcggcctcggctccaccctctacacccacctcctcaagagcatggaggcccagggcttcaagtccgtggtggccgtgatcggcctcccgaacgacccgtccgtgcgcctccacgaggccctcggctacaccgcccgcggcaccctccgcgccgccggctacaagcacggcggctggcacgacgtcggcttctggcagcgcgacttcgagctgccggccccgccgcgcccggtgcgcccggtgacgcagatctgagtcgaaacctagacttgtccatcttctggattggccaacttaattaatgtatgaaataaaaggatgcacacatagtgacatgctaatcactataatgtgggcatcaaagttgtgtgttatgtgtaattactagttatctgaataaaagagaaagagatcatccatatttcttatcctaaatgaatgtcacgtgtctttataattctttgatgaaccagatgcatttcattaaccaaatccatatacatataaatattaatcatatataattaatatcaattgggttagcaaaacaaatctagtctaggtgtgttttgcgaatgcggccgccaccgcggtggagctcgaattcattccgattaatcgtggcctcttgctcttcaggatgaagagctatgtttaaacgtgcaagcgctactagacaattcagtacattaaaaacgtccgcaatgtgttattaagttgtctaagcgtcaatttgtttacaccacaatatatcctgccaccagccagccaacagctccccgaccggcagctcggcacaaaatcaccactcgatacaggcagcccatcagtccgggacggcgtcagcgggagagccgttgtaaggcggcagactttgctcatgttaccgatgctattcggaagaacggcaactaagctgccgggtttgaaacacggatgatctcgcggagggtagcatgttgattgtaacgatgacagagcgttgctgcctgtgatcaaatatcatctccctcgcagagatccgaattatcagccttcttattcatttctcgcttaaccgtgacaggctgtcgatcttgagaactatgccgacataataggaaatcgctggataaagccgctgaggaagctgagtggcgctatttctttagaagtgaacgttgacgatcgtcgaccgtaccccgatgaattaattcggacgtacgttctgaacacagctggatacttacttgggcgattgtcatacatgacatcaacaatgtacccgtttgtgtaaccgtctcttggaggttcgtatgacactagtggttcccctcagcttgcgactagatgttgaggcctaacattttattagagagcaggctagttgcttagatacatgatcttcaggccgttatctgtcagggcaagcgaaaattggccatttatgacgaccaatgccccgcagaagctcccatctttgccgccatagacgccgcgccccccttttggggtgtagaacatccttttgccagatgtggaaaagaagttcgttgtcccattgttggcaatgacgtagtagccggcgaaagtgcgagacccatttgcgctatatataagcctacgatttccgttgcgactattgtcgtaattggatgaactattatcgtagttgctctcagagttgtcgtaatttgatggactattgtcgtaattgcttatggagttgtcgtagttgcttggagaaatgtcgtagttggatggggagtagtcatagggaagacgagcttcatccactaaaacaattggcaggtcagcaagtgcctgccccgatgccatcgcaagtacgaggcttagaaccaccttcaacagatcgcgcatagtcttccccagctctctaacgcttgagttaagccgcgccgcgaagcggcgtcggcttgaacgaattgttagacattatttgccgactaccttggtgatctcgcctttcacgtagtgaacaaattcttccaactgatctgcgcgcgaggccaagcgatcttcttgtccaagataagcctgcctagcttcaagtatgacgggctgatactgggccggcaggcgctccattgcccagtcggcagcgacatccttcggcgcgattttgccggttactgcgctgtaccaaatgcgggacaacgtaagcactacatttcgctcatcgccagcccagtcgggcggcgagttccatagcgttaaggtttcatttagcgcctcaaatagatcctgttcaggaaccggatcaaagagttcctccgccgctggacctaccaaggcaacgctatgttctcttgcttttgtcagcaagatagccagatcaatgtcgatcgtggctggctcgaagatacctgcaagaatgtcattgcgctgccattctccaaattgcagttcgcgcttagctggataacgccacggaatgatgtcgtcgtgcacaacaatggtgacttctacagcgcggagaatctcgctctctccaggggaagccgaagtttccaaaaggtcgttgatcaaagctcgccgcgttgtttcatcaagccttacagtcaccgtaaccagcaaatcaatatcactgtgtggcttcaggccgccatccactgcggagccgtacaaatgtacggccagcaacgtcggttcgagatggcgctcgatgacgccaactacctctgatagttgagtcgatacttcggcgatcaccgcttccctcatgatgtttaactcctgaattaagccgcgccgcgaagcggtgtcggcttgaatgaattgttaggcgtcatcctgtgctcccgagaaccagtaccagtacatcgctgtttcgttcgagacttgaggtctagttttatacgtgaacaggtcaatgccgccgagagtaaagccacattttgcgtacaaattgcaggcaggtacattgttcgtttgtgtctctaatcgtatgccaaggagctgtctgcttagtgcccactttttcgcaaattcgatgagactgtgcgcgactcctttgcctcggtgcgtgtgcgacacaacaatgtgttcgatagaggctagatcgttccatgttgagttgagttcaatcttcccgacaagctcttggtcgatgaatgcgccatagcaagcagagtcttcatcagagtcatcatccgagatgtaatccttccggtaggggctcacacttctggtagatagttcaaagccttggtcggataggtgcacatcgaacacttcacgaacaatgaaatggttctcagcatccaatgtttccgccacctgctcagggatcaccgaaatcttcatatgacgcctaacgcctggcacagcggatcgcaaacctggcgcggcttttggcacaaaaggcgtgacaggtttgcgaatccgttgctgccacttgttaacccttttgccagatttggtaactataatttatgttagaggcgaagtcttgggtaaaaactggcctaaaattgctggggatttcaggaaagtaaacatcaccttccggctcgatgtctattgtagatatatgtagtgtatctacttgatcgggggatctgctgcctcgcgcgtttcggtgatgacggtgaaaacctctgacacatgcagctcccggagacggtcacagcttgtctgtaagcggatgccgggagcagacaagcccgtcagggcgcgtcagcgggtgttggcgggtgtcggggcgcagccatgacccagtcacgtagcgatagcggagtgtatactggcttaactatgcggcatcagagcagattgtactgagagtgcaccatatgcggtgtgaaataccgcacagatgcgtaaggagaaaataccgcatcaggcgctcttccgcttcctcgctcactgactcgctgcgctcggtcgttcggctgcggcgagcggtatcagctcactcaaaggcggtaatacggttatccacagaatcaggggataacgcaggaaagaacatgtgagcaaaaggccagcaaaaggccaggaaccgtaaaaaggccgcgttgctggcgtttttccataggctccgcccccctgacgagcatcacaaaaatcgacgctcaagtcagaggtggcgaaacccgacaggactataaagataccaggcgtttccccctggaagctccctcgtgcgctctcctgttccgaccctgccgcttaccggatacctgtccgcctttctcccttcgggaagcgtggcgctttctcatagctcacgctgtaggtatctcagttcggtgtaggtcgttcgctccaagctgggctgtgtgcacgaaccccccgttcagcccgaccgctgcgccttatccggtaactatcgtcttgagtccaacccggtaagacacgacttatcgccactggcagcagccactggtaacaggattagcagagcgaggtatgtaggcggtgctacagagttcttgaagtggtggcctaactacggctacactagaaggacagtatttggtatctgcgctctgctgaagccagttaccttcggaaaaagagttggtagctcttgatccggcaaacaaaccaccgctggtagcggtggtttttttgtttgcaagcagcagattacgcgcagaaaaaaaggatctcaagaagatcctttgatcttttctacggggtctgacgctcagtggaacgaaaactcacgttaagggattttggtcatgagattatcaaaaaggatcttcacctagatccttttaaattaaaaatgaagttttaaatcaatctaaagtatatatgagtaaacttggtctgacagttaccaatgcttaatcagtgaggcacctatctcagcgatctgtctatttcgttcatccatagttgcctgactccccgtcgtgtagataactacgatacgggagggcttaccatctggccccagtgctgcaatgataccgcgagacccacgctcaccggctccagatttatcagcaataaaccagccagccggaagggccgagcgcagaagtggtcctgcaactttatccgcctccatccagtctattaattgttgccgggaagctagagtaagtagttcgccagttaatagtttgcgcaacgttgttgccattgctgcagggggggggggggggggggacttccattgttcattccacggacaaaaacagagaaaggaaacgacagaggccaaaaagcctcgctttcagcacctgtcgtttcctttcttttcagagggtattttaaataaaaacattaagttatgacgaagaagaacggaaacgccttaaaccggaaaattttcataaatagcgaaaacccgcgaggtcgccgccccgtaacctgtcggatcaccggaaaggacccgtaaagtgataatgattatcatctacatatcacaacgtgcgtggaggccatcaaaccacgtcaaataatcaattatgacgcaggtatcgtattaattgatctgcatcaacttaacgtaaaaacaacttcagacaatacaaatcagcgacactgaatacggggcaacctcatgtcccccccccccccccccctgcaggcatcgtggtgtcacgctcgtcgtttggtatggcttcattcagctccggttcccaacgatcaaggcgagttacatgatcccccatgttgtgcaaaaaagcggttagctccttcggtcctccgatcgttgtcagaagtaagttggccgcagtgttatcactcatggttatggcagcactgcataattctcttactgtcatgccatccgtaagatgcttttctgtgactggtgagtactcaaccaagtcattctgagaatagtgtatgcggcgaccgagttgctcttgcccggcgtcaacacgggataataccgcgccacatagcagaactttaaaagtgctcatcattggaaaacgttcttcggggcgaaaactctcaaggatcttaccgctgttgagatccagttcgatgtaacccactcgtgcacccaactgatcttcagcatcttttactttcaccagcgtttctgggtgagcaaaaacaggaaggcaaaatgccgcaaaaaagggaataagggcgacacggaaatgttgaatactcatactcttcctttttcaatattattgaagcatttatcagggttattgtctcatgagcggatacatatttgaatgtatttagaaaaataaacaaataggggttccgcgcacatttccccgaaaagtgccacctgacgtctaagaaaccattattatcatgacattaacctataaaaataggcgtatcacgaggccctttcgtcttcaagaattcggagcttttgccattctcaccggattcagtcgtcactcatggtgatttctcacttgataaccttatttttgacgaggggaaattaataggttgtattgatgttggacgagtcggaatcgcagaccgataccaggatcttgccatcctatggaactgcctcggtgagttttctccttcattacagaaacggctttttcaaaaatatggtattgataatcctgatatgaataaattgcagtttcatttgatgctcgatgagtttttctaatcagaattggttaattggttgtaacactggcagagcattacgctgacttgacgggacggcggctttgttgaataaatcgaacttttgctgagttgaaggatcagatcacgcatcttcccgacaacgcagaccgttccgtggcaaagcaaaagttcaaaatcaccaactggtccacctacaacaaagctctcatcaaccgtggctccctcactttctggctggatgatggggcgattcaggcctggtatgagtcagcaacaccttcttcacgaggcagacctcagcgccagaaggccgccagagaggccgagcgcggccgtgaggcttggacgctagggcagggcatgaaaaagcccgtagcgggctgctacgggcgtctgacgcggtggaaagggggaggggatgttgtctacatggctctgctgtagtgagtgggttgcgctccggcagcggtcctgatcaatcgtcaccctttctcggtccttcaacgttcctgacaacgagcctccttttcgccaatccatcgacaatcaccgcgagtccctgctcgaacgctgcgtccggaccggcttcgtcgaaggcgtctatcgcggcccgcaacagcggcgagagcggagcctgttcaacggtgccgccgcgctcgccggcatcgctgtcgccggcctgctcctcaagcacggccccaacagtgaagtagctgattgtcatcagcgcattgacggcgtccccggccgaaaaacccgcctcgcagaggaagcgaagctgcgcgtcggccgtttccatctgcggtgcgcccggtcgcgtgccggcatggatgcgcgcgccatcgcggtaggcgagcagcgcctgcctgaagctgcgggcattcccgatcagaaatgagcgccagtcgtcgtcggctctcggcaccgaatgcgtatgattctccgccagcatggcttcggccagtgcgtcgagcagcgcccgcttgttcctgaagtgccagtaaagcgccggctgctgaacccccaaccgttccgccagtttgcgtgtcgtcagaccgtctacgccgacctcgttcaacaggtccagggcggcacggatcactgtattcggctgcaactttgtcatgcttgacactttatcactgataaacataatatgtccaccaacttatcagtgataaagaatccgcgcgttcaatcggaccagcggaggctggtccggaggccagacgtgaaacccaacatacccctgatcgtaattctgagcactgtcgcgctcgacgctgtcggcatcggcctgattatgccggtgctgccgggcctcctgcgcgatctggttcactcgaacgacgtcaccgcccactatggcattctgctggcgctgtatgcgttggtgcaatttgcctgcgcacctgtgctgggcgcgctgtcggatcgtttcgggcggcggccaatcttgctcgtctcgctggccggcgccactgtcgactacgccatcatggcgacagcgcctttcctttgggttctctatatcgggcggatcgtggccggcatcaccggggcgactggggcggtagccggcgcttatattgccgatatcactgatggcgatgagcgcgcgcggcacttcggcttcatgagcgcctgtttcgggttcgggatggtcgcgggacctgtgctcggtgggctgatgggcggtttctccccccacgctccgttcttcgccgcggcagccttgaacggcctcaatttcctgacgggctgtttccttttgccggagtcgcacaaaggcgaacgccggccgttacgccgggaggctctcaacccgctcgcttcgttccggtgggcccggggcatgaccgtcgtcgccgccctgatggcggtcttcttcatcatgcaacttgtcggacaggtgccggccgcgctttgggtcattttcggcgaggatcgctttcactgggacgcgaccacgatcggcatttcgcttgccgcatttggcattctgcattcactcgcccaggcaatgatcaccggccctgtagccgcccggctcggcgaaaggcgggcactcatgctcggaatgattgccgacggcacaggctacatcctgcttgccttcgcgacacggggatggatggcgttcccgatcatggtcctgcttgcttcgggtggcatcggaatgccggcgctgcaagcaatgttgtccaggcaggtggatgaggaacgtcaggggcagctgcaaggctcactggcggcgctcaccagcctgacctcgatcgtcggacccctcctcttcacggcgatctatgcggcttctataacaacgtggaacgggtgggcatggattgcaggcgctgccctctacttgctctgcctgccggcgctgcgtcgcgggctttggagcggcgcagggcaacgagccgatcgctgatcgtggaaacgataggcctatgccatgcgggtcaaggcgacttccggcaagctatacgcgccctaggagtgcggttggaacgttggcccagccagatactcccgatcacgagcaggacgccgatgatttgaagcgcactcagcgtctgatccaagaacaaccatcctagcaacacggcggtccccgggctgagaaagcccagtaaggaaacaactgtaggttcgagtcgcgagatcccccggaaccaaaggaagtaggttaaacccgctccgatcaggccgagccacgccaggccgagaacattggttcctgtaggcatcgggattggcggatcaaacactaaagctactggaacgagcagaagtcctccggccgccagttgccaggcggtaaaggtgagcagaggcacgggaggttgccacttgcgggtcagcacggttccgaacgccatggaaaccgcccccgccaggcccgctgcgacgccgacaggatctagcgctgcgtttggtgtcaacaccaacagcgccacgcccgcagttccgcaaatagcccccaggaccgccatcaatcgtatcgggctacctagcagagcggcagagatgaacacgaccatcagcggctgcacagcgcctaccgtcgccgcgaccccgcccggcaggcggtagaccgaaataaacaacaagctccagaatagcgaaatattaagtgcgccgaggatgaagatgcgcatccaccagattcccgttggaatctgtcggacgatcatcacgagcaataaacccgccggcaacgcccgcagcagcataccggcgacccctcggcctcgctgttcgggctccacgaaaacgccggacagatgcgccttgtgagcgtccttggggccgtcctcctgtttgaagaccgacagcccaatgatctcgccgtcgatgtaggcgccgaatgccacggcatctcgcaaccgttcagcgaacgcctccatgggctttttctcctcgtgctcgtaaacggacccgaacatctctggagctttcttcagggccgacaatcggatctcgcggaaatcctgcacgtcggccgctccaagccgtcgaatctgagccttaatcacaattgtcaattttaatcctctgtttatcggcagttcgtagagcgcgccgtgcgtcccgagcgatactgagcgaagcaagtgcgtcgagcagtgcccgcttgttcctgaaatgccagtaaagcgctggctgctgaacccccagccggaactgaccccacaaggccctagcgtttgcaatgcaccaggtcatcattgacccaggcgtgttccaccaggccgctgcctcgcaactcttcgcaggcttcgccgacctgctcgcgccacttcttcacgcgggtggaatccgatccgcacatgaggcggaaggtttccagcttgagcgggtacggctcccggtgcgagctgaaatagtcgaacatccgtcgggccgtcggcgacagcttgcggtacttctcccatatgaatttcgtgtagtggtcgccagcaaacagcacgacgatttcctcgtcgatcaggacctggcaacgggacgttttcttgccacggtccaggacgcggaagcggtgcagcagcgacaccgattccaggtgcccaacgcggtcggacgtgaagcccatcgccgtcgcctgtaggcgcgacaggcattcctcggccttcgtgtaataccggccattgatcgaccagcccaggtcctggcaaagctcgtagaacgtgaaggtgatcggctcgccgataggggtgcgcttcgcgtactccaacacctgctgccacaccagttcgtcatcgtcggcccgcagctcgacgccggtgtaggtgatcttcacgtccttgttgacgtggaaaatgaccttgttttgcagcgcctcgcgcgggattttcttgttgcgcgtggtgaacagggcagagcgggccgtgtcgtttggcatcgctcgcatcgtgtccggccacggcgcaatatcgaacaaggaaagctgcatttccttgatctgctgcttcgtgtgtttcagcaacgcggcctgcttggcctcgctgacctgttttgccaggtcctcgccggcggtttttcgcttcttggtcgtcatagttcctcgcgtgtcgatggtcatcgacttcgccaaacctgccgcctcctgttcgagacgacgcgaacgctccacggcggccgatggcgcgggcagggcagggggagccagttgcacgctgtcgcgctcgatcttggccgtagcttgctggaccatcgagccgacggactggaaggtttcgcggggcgcacgcatgacggtgcggcttgcgatggtttcggcatcctcggcggaaaaccccgcgtcgatcagttcttgcctgtatgccttccggtcaaacgtccgattcattcaccctccttgcgggattgccccgactcacgccggggcaatgtgcccttattcctgatttgacccgcctggtgccttggtgtccagataatccaccttatcggcaatgaagtcggtcccgtagaccgtctggccgtccttctcgtacttggtattccgaatcttgccctgcacgaataccagcgaccccttgcccaaatacttgccgtgggcctcggcctgagagccaaaacacttgatgcggaagaagtcggtgcgctcctgcttgtcgccggcatcgttgcgccactcttcattaaccgctatatcgaaaattgcttgcggcttgttagaattgccatgacgtacctcggtgtcacgggtaagattaccgataaactggaactgattatggctcatatcgaaagtctccttgagaaaggagactctagtttagctaaacattggttccgctgtcaagaactttagcggctaaaattttgcgggccgcgaccaaaggtgcgaggggcggcttccgctgtgtacaaccagatatttttcaccaacatccttcgtctgctcgatgagcggggcatgacgaaacatgagctgtcggagagggcaggggtttcaatttcgtttttatcagacttaaccaacggtaaggccaacccctcgttgaaggtgatggaggccattgccgacgccctggaaactcccctacctcttctcctggagtccaccgaccttgaccgcgaggcactcgcggagattgcgggtcatcctttcaagagcagcgtgccgcccggatacgaacgcatcagtgtggttttgccgtcacataaggcgtttatcgtaaagaaatggggcgacgacacccgaaaaaagctgcgtggaaggctctgacgccaagggttagggcttgcacttccttctttagccgctaaaacggccccttctctgcgggccgtcggctcgcgcatcatatcgacatcctcaacggaagccgtgccgcgaatggcatcgggcgggtgcgctttgacagttgttttctatcagaacccctacgtcgtgcggttcgattagctgtttgtcttgcaggctaaacactttcggtatatcgtttgcctgtgcgataatgttgctaatgatttgttgcgtaggggttactgaaaagtgagcgggaaagaagagtttcagaccatcaaggagcgggccaagcgcaagctggaacgcgacatgggtgcggacctgttggccgcgctcaacgacccgaaaaccgttgaagtcatgctcaacgcggacggcaaggtgtggcacgaacgccttggcgagccgatgcggtacatctgcgacatgcggcccagccagtcgcaggcgattatagaaacggtggccggattccacggcaaagaggtcacgcggcattcgcccatcctggaaggcgagttccccttggatggcagccgctttgccggccaattgccgccggtcgtggccgcgccaacctttgcgatccgcaagcgcgcggtcgccatcttcacgctggaacagtacgtcgaggcgggcatcatgacccgcgagcaatacgaggtcattaaaagcgccgtcgcggcgcatcgaaacatcctcgtcattggcggtactggctcgggcaagaccacgctcgtcaacgcgatcatcaatgaaatggtcgccttcaacccgtctgagcgcgtcgtcatcatcgaggacaccggcgaaatccagtgcgccgcagagaacgccgtccaataccacaccagcatcgacgtctcgatgacgctgctgctcaagacaacgctgcgtatgcgccccgaccgcatcctggtcggtgaggtacgtggccccgaagcccttgatctgttgatggcctggaacaccgggcatgaaggaggtgccgccaccctgcacgcaaacaaccccaaagcgggcctgagccggctcgccatgcttatcagcatgcacccggattcaccgaaacccattgagccgctgattggcgaggcggttcatgtggtcgtccatatcgccaggacccctagcggccgtcgagtgcaagaaattctcgaagttcttggttacgagaacggccagtacatcaccaaaaccctgtaaggagtatttccaatgacaacggctgttccgttccgtctgaccatgaatcgcggcattttgttctaccttgccgtgttcttcgttctcgctctcgcgttatccgcgcatccggcgatggcctcggaaggcaccggcggcagcttgccatatgagagctggctgacgaacctgcgcaactccgtaaccggcccggtggccttcgcgctgtccatcatcggcatcgtcgtcgccggcggcgtgctgatcttcggcggcgaactcaacgccttcttccgaaccctgatcttcctggttctggtgatggcgctgctggtcggcgcgcagaacgtgatgagcaccttcttcggtcgtggtgccgaaatcgcggccctcggcaacggggcgctgcaccaggtgcaagtcgcggcggcggatgccgtgcgtgcggtagcggctggacggctcgcctaatcatggctctgcgcacgatccccatccgtcgcgcaggcaaccgagaaaacctgttcatgggtggtgatcgtgaactggtgatgttctcgggcctgatggcgtttgcgctgattttcagcgcccaagagctgcgggccaccgtggtcggtctgatcctgtggttcggggcgctctatgcgttccgaatcatggcgaaggccgatccgaagatgcggttcgtgtacctgcgtcaccgccggtacaagccgtattacccggcccgctcgaccccgttccgcgagaacaccaatagccaagggaagcaataccgatgatccaagcaattgcgattgcaatcgcgggcctcggcgcgcttctgttgttcatcctctttgcccgcatccgcgcggtcgatgccgaactgaaactgaaaaagcatcgttccaaggacgccggcctggccgatctgctcaactacgccgctgtcgtcgatgacggcgtaatcgtgggcaagaacggcagctttatggctgcctggctgtacaagggcgatgacaacgcaagcagcaccgaccagcagcgcgaagtagtgtccgcccgcatcaaccaggccctcgcgggcctgggaagtgggtggatgatccatgtggacgccgtgcggcgtcctgctccgaactacgcggagcggggcctgtcggcgttccctgaccgtctgacggcagcgattgaagaagagcgctcggtcttgccttgctcgtcggtgatgtacttcaccagctccgcgaagtcgctcttcttgatggagcgcatggggacgtgcttggcaatcacgcgcaccccccggccgttttagcggctaaaaaagtcatggctctgccctcgggcggaccacgcccatcatgaccttgccaagctcgtcctgcttctcttcgatcttcgccagcagggcgaggatcgtggcatcaccgaaccgcgccgtgcgcgggtcgtcggtgagccagagtttcagcaggccgcccaggcggcccaggtcgccattgatgcgggccagctcgcggacgtgctcatagtccacgacgcccgtgattttgtagccctggccgacggccagcaggtaggccgacaggctcatgccggccgccgccgccttttcctcaatcgctcttcgttcgtctggaaggcagtacaccttgataggtgggctgcccttcctggttggcttggtttcatcagccatccgcttgccctcatctgttacgccggcggtagccggccagcctcgcagagcaggattcccgttgagcaccgccaggtgcgaataagggacagtgaagaaggaacacccgctcgcgggtgggcctacttcacctatcctgcccggctgacgccgttggatacaccaaggaaagtctacacgaaccctttggcaaaatcctgtatatcgtgcgaaaaaggatggatataccgaaaaaatcgctataatgaccccgaagcagggttatgcagcggaaaagcgctgcttccctgctgttttgtggaatatctaccgactggaaacaggcaaatgcaggaaattactgaactgaggggacaggcgagagacgatgccaaagagctacaccgacgagctggccgagtgggttgaatcccgcgcggccaagaagcgccggcgtgatgaggctgcggttgcgttcctggcggtgagggcggatgtcgaggcggcgttagcgtccggctatgcgctcgtcaccatttgggagcacatgcgggaaacggggaaggtcaagttctcctacgagacgttccgctcgcacgccaggcggcacatcaaggccaagcccgccgatgtgcccgcaccgcaggccaaggctgcggaacccgcgccggcacccaagacgccggagccacggcggccgaagcaggggggcaaggctgaaaagccggcccccgctgcggccccgaccggcttcaccttcaacccaacaccggacaaaaaggatctactgtaatggcgaaaattcacatggttttgcagggcaagggcggggtcggcaagtcggccatcgccgcgatcattgcgcagtacaagatggacaaggggcagacacccttgtgcatcgacaccgacccggtgaacgcgacgttcgagggctacaaggccctgaacgtccgccggctgaacatcatggccggcgacgaaattaactcgcgcaacttcgacaccctggtcgagctgattgcgccgaccaaggatgacgtggtgatcgacaacggtgccagctcgttcgtgcctctgtcgcattacctcatcagcaaccaggtgccggctctgctgcaagaaatggggcatgagctggtcatccataccgtcgtcaccggcggccaggctctcctggacacggtgagcggcttcgcccagctcgccagccagttcccggccgaagcgcttttcgtggtctggctgaacccgtattgggggcctatcgagcatgagggcaagagctttgagcagatgaaggcgtacacggccaacaaggcccgcgtgtcgtccatcatccagattccggccctcaaggaagaaacctacggccgcgatttcagcgacatgctgcaagagcggctgacgttcgaccaggcgctggccgatgaatcgctcacgatcatgacgcggcaacgcctcaagatcgtgcggcgcggcctgtttgaacagctcgacgcggcggccgtgctatgagcgaccagattgaagagctgatccgggagattgcggccaagcacggcatcgccgtcggccgcgacgacccggtgctgatcctgcataccatcaacgcccggctcatggccgacagtgcggccaagcaagaggaaatccttgccgcgttcaaggaagagctggaagggatcgcccatcgttggggcgaggacgccaaggccaaagcggagcggatgctgaacgcggccctggcggccagcaaggacgcaatggcgaaggtaatgaaggacagcgccgcgcaggcggccgaagcgatccgcagggaaatcgacgacggccttggccgccagctcgcggccaaggtcgcggacgcgcggcgcgtggcgatgatgaacatgatcgccggcggcatggtgttgttcgcggccgccctggtggtgtgggcctcgttatgaatcgcagaggcgcagatgaaaaagcccggcgttgccgggctttgtttttgcgttagctgggcttgtttgacaggcccaagctctgactgcgcccgcgctcgcgctcctgggcctgtttcttctcctgctcctgcttgcgcatcagggcctggtgccgtcgggctgcttcacgcatcgaatcccagtcgccggccagctcgggatgctccgcgcgcatcttgcgcgtcgccagttcctcgatcttgggcgcgtgaatgcccatgccttccttgatttcgcgcaccatgtccagccgcgtgtgcagggtctgcaagcgggcttgctgttgggcctgctgctgctgccaggcggcctttgtacgcggcagggacagcaagccgggggcattggactgtagctgctgcaaacgcgcctgctgacggtctacgagctgttctaggcggtcctcgatgcgctccacctggtcatgctttgcctgcacgtagagcgcaagggtctgctggtaggtctgctcgatgggcgcggattctaagagggcctgctgttccgtctcggcctcctgggccgcctgtagcaaatcctcgccgctgttgccgctggactgctttactgccggggactgctgttgccctgctcgcgccgtcgtcgcagttcggcttgcccccactcgattgactgcttcatttcgagccgcagcgatgcgatctcggattgcgtcaacggacggggcagcgcggaggtgtccggcttctccttgggtgagtcggtcgatgccatagccaaaggtttccttccaaaatgcgtccattgctggaccgtgtttctcattgatgcccgcaagcatcttcggcttgaccgccaggtcaagcgcgccttcatgggcggtcatgacggacgccgccatgaccttgccgccgttgttctcgatgtagccgcgtaatgaggcaatggtgccgcccatcgtcagcgtgtcatcgacaacgatgtacttctggccggggatcacctccccctcgaaagtcgggttgaacgccaggcgatgatctgaaccggctccggttcgggcgaccttctcccgctgcacaatgtccgtttcgacctcaaggccaaggcggtcggccagaacgaccgccatcatggccggaatcttgttgttccccgccgcctcgacggcgaggactggaacgatgcggggcttgtcgtcgccgatcagcgtcttgagctgggcaacagtgtcgtccgaaatcaggcgctcgaccaaattaagcgccgcttccgcgtcgccctgcttcgcagcctggtattcaggctcgttggtcaaagaaccaaggtcgccgttgcgaaccaccttcgggaagtctccccacggtgcgcgctcggctctgctgtagctgctcaagacgcctccctttttagccgctaaaactctaacgagtgcgcccgcgactcaacttgacgctttcggcacttacctgtgccttgccacttgcgtcataggtgatgcttttcgcactcccgatttcaggtactttatcgaaatctgaccgggcgtgcattacaaagttcttccccacctgttggtaaatgctgccgctatctgcgtggacgatgctgccgtcgtggcgctgcgacttatcggccttttgggccatatagatgttgtaaatgccaggtttcagggccccggctttatctaccttctggttcgtccatgcgccttggttctcggtctggacaattctttgcccattcatgaccaggaggcggtgtttcattgggtgactcctgacggttgcctctggtgttaaacgtgtcctggtcgcttgccggctaaaaaaaagccgacctcggcagttcgaggccggctttccctagagccgggcgcgtcaaggttgttccatctattttagtgaactgcgttcgatttatcagttactttcctcccgctttgtgtttcctcccactcgtttccgcgtctagccgacccctcaacatagcggcctcttcttgggctgcctttgcctcttgccgcgcttcgtcacgctcggcttgcaccgtcgtaaagcgctcggcctgcctggccgcctcttgcgccgccaacttcctttgctcctggtgggcctcggcgtcggcctgcgccttcgctttcaccgctgccaactccgtgcgcaaactctccgcttcgcgcctggtggcgtcgcgctcgccgcgaagcgcctgcatttcctggttggccgcgtccagggtcttgcggctctcttctttgaatgcgcgggcgtcctggtgagcgtagtccagctcggcgcgcagctcctgcgctcgacgctccacctcgtcggcccgctgcgtcgccagcgcggcccgctgctcggctcctgccagggcggtgcgtgcttcggccagggcttgccgctggcgtgcggccagctcggccgcctcggcggcctgctgctctagcaatgtaacgcgcgcctgggcttcttccagctcgcgggcctgcgcctcgaaggcgtcggccagctccccgcgcacggcttccaactcgttgcgctcacgatcccagccggcttgcgctgcctgcaacgattcattggcaagggcctgggcggcttgccagagggcggccacggcctggttgccggcctgctgcaccgcgtccggcacctggactgccagcggggcggcctgcgccgtgcgctggcgtcgccattcgcgcatgccggcgctggcgtcgttcatgttgacgcgggcggccttacgcactgcatccacggtcgggaagttctcccggtcgccttgctcgaacagctcgtccgcagccgcaaaaatgcggtcgcgcgtctctttgttcagttccatgttggctccggtaattggtaagaataataatactcttacctaccttatcagcgcaagagtttagctgaacagttctcgacttaacggcaggttttttagcggctgaagggcaggcaaaaaaagccccgcacggtcggcgggggcaaagggtcagcgggaaggggattagcgggcgtcgggcttcttcatgcgtcggggccgcgcttcttgggatggagcacgacgaagcgcgcacgcgcatcgtcctcggccctatcggcccgcgtcgcggtcaggaacttgtcgcgcgctaggtcctccctggtgggcaccaggggcatgaactcggcctgctcgatgtaggtccactccatgaccgcatcgcagtcgaggccgcgttccttcaccgtctcttgcaggtcgcggtacgcccgctcgttgagcggctggtaacgggccaattggtcgtaaatggctgtcggccatgagcggcctttcctgttgagccagcagccgacgacgaagccggcaatgcaggcccctggcacaaccaggccgacgccgggggcaggggatggcagcagctcgccaaccaggaaccccgccgcgatgatgccgatgccggtcaaccagcccttgaaactatccggccccgaaacacccctgcgcattgcctggatgctgcgccggatagcttgcaacatcaggagccgtttcttttgttcgtcagtcatggtccgccctcaccagttgttcgtatcggtgtcggacgaactgaaatcgcaagagctgccggtatcggtccagccgctgtccgtgtcgctgctgccgaagcacggcgaggggtccgcgaacgccgcagacggcgtatccggccgcagcgcatcgcccagcatggccccggtcagcgagccgccggccaggtagcccagcatggtgctgttggtcgccccggccaccagggccgacgtgacgaaatcgccgtcattccctctggattgttcgctgctcggcggggcagtgcgccgcgccggcggcgtcgtggatggctcgggttggctggcctgcgacggccggcgaaaggtgcgcagcagctcgttatcgaccggctgcggcgtcggggccgccgccttgcgctgcggtcggtgttccttcttcggctcgcgcagcttgaacagcatgatcgcggaaaccagcagcaacgccgcgcctacgcctcccgcgatgtagaacagcatcggattcattcttcggtcctccttgtagcggaaccgttgtctgtgcggcgcgggtggcccgcgccgctgtctttggggatcagccctcgatgagcgcgaccagtttcacgtcggcaaggttcgcctcgaactcctggccgtcgtcctcgtacttcaaccaggcatagccttccgccggcggccgacggttgaggataaggcgggcagggcgctcgtcgtgctcgacctggacgatggcctttttcagcttgtccgggtccggctccttcgcgcccttttccttggcgtccttaccgtcctggtcgccgtcctcgccgtcctggccgtcgccggcctccgcgtcacgctcggcatcagtctggccgttgaaggcatcgacggtgttgggatcgcggcccttctcgtccaggaactcgcgcagcagcttgaccgtgccgcgcgtgatttcctgggtgtcgtcgtcaagccacgcctcgacttcctccgggcgcttcttgaaggccgtcaccagctcgttcaccacggtcacgtcgcgcacgcggccggtgttgaacgcatcggcgatcttctccggcaggtccagcagcgtgacgtgctgggtgatgaacgccggcgacttgccgatttccttggcgatatcgcctttcttcttgcccttcgccagctcgcggccaatgaagtcggcaatttcgcgcggggtcagctcgttgcgttgcaggttctcgataacctggtcggcttcgttgtagtcgttgtcgatgaacgccgggatggacttcttgccggcccacttcgagccacggtagcggcgggcgccgtgattgatgatatagcggcccggctgctcctggttctcgcgcaccgaaatgggtgacttcaccccgcgctctttgatcgtggcaccgatttccgcgatgctctccggggaaaagccggggttgtcggccgtccgcggctgatgcggatcttcgtcgatcaggtccaggtccagctcgatagggccggaaccgccctgagacgccgcaggagcgtccaggaggctcgacaggtcgccgatgctatccaaccccaggccggacggctgcgccgcgcctgcggcttcctgagcggccgcagcggtgtttttcttggtggtcttggcttgagccgcagtcattgggaaatctccatcttcgtgaacacgtaatcagccagggcgcgaacctctttcgatgccttgcgcgcggccgttttcttgatcttccagaccggcacaccggatgcgagggcatcggcgatgctgctgcgcaggccaacggtggccggaatcatcatcttggggtacgcggccagcagctcggcttggtggcgcgcgtggcgcggattccgcgcatcgaccttgctgggcaccatgccaaggaattgcagcttggcgttcttctggcgcacgttcgcaatggtcgtgaccatcttcttgatgccctggatgctgtacgcctcaagctcgatgggggacagcacatagtcggccgcgaagagggcggccgccaggccgacgccaagggtcggggccgtgtcgatcaggcacacgtcgaagccttggttcgccagggccttgatgttcgccccgaacagctcgcgggcgtcgtccagcgacagccgttcggcgttcgccagtaccgggttggactcgatgagggcgaggcgcgcggcctggccgtcgccggctgcgggtgcggtttcggtccagccgccggcagggacagcgccgaacagcttgcttgcatgcaggccggtagcaaagtccttgagcgtgtaggacgcattgccctgggggtccaggtcgatcacggcaacccgcaagccgcgctcgaaaaagtcgaaggcaagatgcacaagggtcgaagtcttgccgacgccgcctttctggttggccgtgaccaaagttttcatcgtttggtttcctgttttttcttggcgtccgcttcccacttccggacgatgtacgcctgatgttccggcagaaccgccgttacccgcgcgtacccctcgggcaagttcttgtcctcgaacgcggcccacacgcgatgcaccgcttgcgacactgcgcccctggtcagtcccagcgacgttgcgaacgtcgcctgtggcttcccatcgactaagacgccccgcgctatctcgatggtctgctgccccacttccagcccctggatcgcctcctggaactggctttcggtaagccgtttcttcatggataacacccataatttgctccgcgccttggttgaacatagcggtgacagccgccagcacatgagagaagtttagctaaacatttctcgcacgtcaacacctttagccgctaaaactcgtccttggcgtaacaaaacaaaagcccggaaaccgggctttcgtctcttgccgcttatggctctgcacccggctccatcaccaacaggtcgcgcacgcgcttcactcggttgcggatcgacactgccagcccaacaaagccggttgccgccgccgccaggatcgcgccgatgatgccggccacaccggccatcgcccaccaggtcgccgccttccggttccattcctgctggtactgcttcgcaatgctggacctcggctcaccataggctgaccgctcgatggcgtatgccgcttctccccttggcgtaaaacccagcgccgcaggcggcattgccatgctgcccgccgctttcccgaccacgacgcgcgcaccaggcttgcggtccagaccttcggccacggcgagctgcgcaaggacataatcagccgccgacttggctccacgcgcctcgatcagctcttgcactcgcgcgaaatccttggcctccacggccgccatgaatcgcgcacgcggcgaaggctccgcagggccggcgtcgtgatcgccgccgagaatgcccttcaccaagttcgacgacacgaaaatcatgctgacggctatcaccatcatgcagacggatcgcacgaacccgctgaattgaacacgagcacggcacccgcgaccactatgccaagaatgcccaaggtaaaaattgccggccccgccatgaagtccgtgaatgccccgacggccgaagtgaagggcaggccgccacccaggccgccgccctcactgcccggcacctggtcgctgaatgtcgatgccagcacctgcggcacgtcaatgcttccgggcgtcgcgctcgggctgatcgcccatcccgttactgccccgatcccggcaatggcaaggactgccagcgctgccatttttggggtgaggccgttcgcggccgaggggcgcagcccctggggggatgggaggcccgcgttagcgggccgggagggttcgagaagggggggcaccccccttcggcgtgcgcggtcacgcgcacagggcgcagccctggttaaaaacaaggtttataaatattggtttaaaagcaggttaaaagacaggttagcggtggccgaaaaacgggcggaaacccttgcaaatgctggattttctgcctgtggacagcccctcaaatgtcaataggtgcgcccctcatctgtcagcactctgcccctcaagtgtcaaggatcgcgcccctcatctgtcagtagtcgcgcccctcaagtgtcaataccgcagggcacttatccccaggcttgtccacatcatctgtgggaaactcgcgtaaaatcaggcgttttcgccgatttgcgaggctggccagctccacgtcgccggccgaaatcgagcctgcccctcatctgtcaacgccgcgccgggtgagtcggcccctcaagtgtcaacgtccgcccctcatctgtcagtgagggccaagttttccgcgaggtatccacaacgccggcggccgcggtgtctcgcacacggcttcgacggcgtttctggcgcgtttgcagggccatagacggccgccagcccagcggcgagggcaaccagcccggtgagcgtcggaaaggcgctggaagccccgtagcgacgcggagaggggcgagacaagccaagggcgcaggctcgatgcgcagcacgacatagccggttctcgcaaggacgagaatttccctgcggtgcccctcaagtgtcaatgaaagtttccaacgcgagccattcgcgagagccttgagtccacgctagatgagagctttgttgtaggtggaccagttggtgattttgaacttttgctttgccacggaacggtctgcgttgtcgggaagatgcgtgatctgatccttcaactcagcaaaagttcgatttattcaacaaagccacgttgtgtctcaaaatctctgatgttacattgcacaagataaaaatatatcatcatgaacaataaaactgtctgcttacataaacagtaatacaaggggtgttatgagccatattcaacgggaaacgtcttgctcgactctagagctcgttcctcgaggcctcgaggcctcgaggaacggtacctgcggggaagcttacaataatgtgtgttgttaagtcttgttgcctgtcatcgtctgactgactttcgtcataaatcccggcctccgtaacccagctttgggcaagctcacggatttgatccggcggaacgggaatatcgagatgccgggctgaacgctgcagttccagctttccctttcgggacaggtactccagctgattgattatctgctgaagggtcttggttccacctcctggcacaatgcgaatgattacttgagcgcgatcgggcatccaattttctcccgtcaggtgcgtggtcaagtgctacaaggcacctttcagtaacgagcgaccgtcgatccgtcgccgggatacggacaaaatggagcgcagtagtccatcgagggcggcgaaagcctcgccaaaagcaatacgttcatctcgcacagcctccagatccgatcgagggtcttcggcgtaggcagatagaagcatggatacattgcttgagagtattccgatggactgaagtatggcttccatcttttctcgtgtgtctgcatctatttcgagaaagcccccgatgcggcgcaccgcaacgcgaattgccatactatccgaaagtcccagcaggcgcgcttgataggaaaaggtttcatactcggccgatcgcagacgggcactcacgaccttgaacccttcaactttcagggatcgatgctggttgatggtagtctcactcgacgtggctctggtgtgttttgacatagcttcctccaaagaaagcggaaggtctggatactccagcacgaaatgtgcccgggtagacggatggaagtctagccctgctcaatatgaaatcaacagtacatttacagtcaatactgaatatacttgctacatttgcaattgtcttataacgaatgtgaaataaaaatagtgtaacaacgcttttactcatcgataatcacaaaaacatttatacgaacaaaaatacaaatgcactccggtttcacaggataggcgggatcagaatatgcaacttttgacgttttgttctttcaaagggggtgctggcaaaaccaccgcactcatgggcctttgcgctgctttggcaaatgacggtaaacgagtggccctctttgatgccgacgaaaaccggcctctgacgcgatggagagaaaacgccttacaaagcagtactgggatcctcgctgtgaagtctattccgccgacgaaatgccccttcttgaagcagcctatgaaaatgccgagctcgaaggatttgattatgcgttggccgatacgcgtggcggctcgagcgagctcaacaacacaatcatcgctagctcaaacctgcttctgatccccaccatgctaacgccgctcgacatcgatgaggcactatctacctaccgctacgtcatcgagctgctgttgagtgaaaatttggcaattcctacagctgttttgcgccaacgcgtcccggtcggccgattgacaacatcgcaacgcaggatgtcagagacgctagagagccttccagttgtaccgtctcccatgcatgaaagagatgcatttgccgcgatgaaagaacgcggcatgttgcatcttacattactaaacacgggaactgatccgacgatgcgcctcatagagaggaatcttcggattgcgatggaggaagtcgtggtcatttcgaaactgatcagcaaaatcttggaggcttgaagatggcaattcgcaagcccgcattgtcggtcggcgaagcacggcggcttgctggtgctcgacccgagatccaccatcccaacccgacacttgttccccagaagctggacctccagcacttgcctgaaaaagccgacgagaaagaccagcaacgtgagcctctcgtcgccgatcacatttacagtcccgatcgacaacttaagctaactgtggatgcccttagtccacctccgtccccgaaaaagctccaggtttttctttcagcgcgaccgcccgcgcctcaagtgtcgaaaacatatgacaacctcgttcggcaatacagtccctcgaagtcgctacaaatgattttaaggcgcgcgttggacgatttcgaaagcatgctggcagatggatcatttcgcgtggccccgaaaagttatccgatcccttcaactacagaaaaatccgttctcgttcagacctcacgcatgttcccggttgcgttgctcgaggtcgctcgaagtcattttgatccgttggggttggagaccgctcgagctttcggccacaagctggctaccgccgcgctcgcgtcattctttgctggagagaagccatcgagcaattggtgaagagggacctatcggaacccctcaccaaatattgagtgtaggtttgaggccgctggccgcgtcctcagtcaccttttgagccagataattaagagccaaatgcaattggctcaggctgccatcgtccccccgtgcgaaacctgcacgtccgcgtcaaagaaataaccggcacctcttgctgtttttatcagttgagggcttgacggatccgcctcaagtttgcggcgcagccgcaaaatgagaacatctatactcctgtcgtaaacctcctcgtcgcgtactcgactggcaatgagaagttgctcgcgcgatagaacgtcgcggggtttctctaaaaacgcgaggagaagattgaactcacctgccgtaagtttcacctcaccgccagcttcggacatcaagcgacgttgcctgagattaagtgtccagtcagtaaaacaaaaagaccgtcggtctttggagcggacaacgttggggcgcacgcgcaaggcaacccgaatgcgtgcaagaaactctctcgtactaaacggcttagcgataaaatcacttgctcctagctcgagtgcaacaactttatccgtctcctcaaggcggtcgccactgataattatgattggaatatcagactttgccgccagatttcgaacgatctcaagcccatcttcacgacctaaatttagatcaacaaccacgacatcgaccgtcgcggaagagagtactctagtgaactgggtgctgtcggctaccgcggtcactttgaaggcgtggatcgtaaggtattcgataataagatgccgcatagcgacatcgtcatcgataagaagaacgtgtttcaacggctcacctttcaatctaaaatctgaacccttgttcacagcgcttgagaaattttcacgtgaaggatgtacaatcatctccagctaaatgggcagttcgtcagaattgcggctgaccgcggatgacgaaaatgcgaaccaagtatttcaattttatgacaaaagttctcaatcgttgttacaagtgaaacgcttcgaggttacagctactattgattaaggagatcgcctatggtctcgccccggcgtcgtgcgtccgccgcgagccagatctcgcctacttcataaacgtcctcataggcacggaatggaatgatgacatcgatcgccgtagagagcatgtcaatcagtgtgcgatcttccaagctagcaccttgggcgctacttttgacaagggaaaacagtttcttgaatccttggattggattcgcgccgtgtattgttgaaatcgatcccggatgtcccgagacgacttcactcagataagcccatgctgcatcgtcgcgcatctcgccaagcaatatccggtccggccgcatacgcagacttgcttggagcaagtgctcggcgctcacagcacccagcccagcaccgttcttggagtagagtagtctaacatgattatcgtgtggaatgacgagttcgagcgtatcttctatggtgattagcctttcctggggggggatggcgctgatcaaggtcttgctcattgttgtcttgccgcttccggtagggccacatagcaacatcgtcagtcggctgacgacgcatgcgtgcagaaacgcttccaaatccccgttgtcaaaatgctgaaggatagcttcatcatcctgattttggcgtttccttcgtgtctgccactggttccacctcgaagcatcataacgggaggagacttctttaagaccagaaacacgcgagcttggccgtcgaatggtcaagctgacggtgcccgagggaacggtcggcggcagacagatttgtagtcgttcaccaccaggaagttcagtggcgcagagggggttacgtggtccgacatcctgctttctcagcgcgcccgctaaaatagcgatatcttcaagatcatcataagagacgggcaaaggcatcttggtaaaaatgccggcttggcgcacaaatgcctctccaggtcgattgatcgcaatttcttcagtcttcgggtcatcgagccattccaaaatcggcttcagaagaaagcgtagttgcggatccacttccatttacaatgtatcctatctctaagcggaaatttgaattcattaagagcggcggttcctcccccgcgtggcgccgccagtcaggcggagctggtaaacaccaaagaaatcgaggtcccgtgctacgaaaatggaaacggtgtcaccctgattcttcttcagggttggcggtatgttgatggttgccttaagggctgtctcagttgtctgctcaccgttattttgaaagctgttgaagctcatcccgccacccgagctgccggcgtaggtgctagctgcctggaaggcgccttgaacaacactcaagagcatagctccgctaaaacgctgccagaagtggctgtcgaccgagcccggcaatcctgagcgaccgagttcgtccgcgcttggcgatgttaacgagatcatcgcatggtcaggtgtctcggcgcgatcccacaacacaaaaacgcgcccatctccctgttgcaagccacgctgtatttcgccaacaacggtggtgccacgatcaagaagcacgatattgttcgttgttccacgaatatcctgaggcaagacacactttacatagcctgccaaatttgtgtcgattgcggtttgcaagatgcacggaattattgtcccttgcgttaccataaaatcggggtgcggcaagagcgtggcgctgctgggctgcagctcggtgggtttcatacgtatcgacaaatcgttctcgccggacacttcgccattcggcaaggagttgtcgtcacgcttgccttcttgtcttcggcccgtgtcgccctgaatggcgcgtttgctgaccccttgatcgccgctgctatatgcaaaaatcggtgtttcttccggccgtggctcatgccgctccggttcgcccctcggcggtagaggagcagcaggctgaacagcctcttgaaccgctggaggatccggcggcacctcaatcggagctggatgaaatggcttggtgtttgttgcgatcaaagttgacggcgatgcgttctcattcaccttcttttggcgcccacctagccaaatgaggcttaatgataacgcgagaacgacacctccgacgatcaatttctgagaccccgaaagacgccggcgatgtttgtcggagaccagggatccagatgcatcaacctcatgtgccgcttgctgactatcgttattcatcccttcgcccccttcaggacgcgtttcacatcgggcctcaccgtgcccgtttgcggcctttggccaacgggatcgtaagcggtgttccagatacatagtactgtgtggccatccctcagacgccaacctcgggaaaccgaagaaatctcgacatcgctccctttaactgaatagttggcaacagcttccttgccatcaggattgatggtgtagatggagggtatgcgtacattgcccggaaagtggaataccgtcgtaaatccattgtcgaagacttcgagtggcaacagcgaacgatcgccttgggcgacgtagtgccaattactgtccgccgcaccaagggctgtgacaggctgatccaataaattctcagctttccgttgatattgtgcttccgcgtgtagtctgtccacaacagccttctgttgtgcctcccttcgccgagccgccgcatcgtcggcggggtaggcgaattggacgctgtaatagagatcgggctgctctttatcgaggtgggacagagtcttggaacttatactgaaaacataacggcgcatcccggagtcgcttgcggttagcacgattactggctgaggcgtgaggacctggcttgccttgaaaaatagataatttccccgcggtagggctgctagatctttgctatttgaaacggcaaccgctgtcaccgtttcgttcgtggcgaatgttacgaccaaagtagctccaaccgccgtcgagaggcgcaccacttgatcgggattgtaagccaaataacgcatgcgcggatctagcttgcccgccattggagtgtcttcagcctccgcaccagtcgcagcggcaaataaacatgctaaaatgaaaagtgcttttctgatcatggttcgctgtggcctacgtttgaaacggtatcttccgatgtctgataggaggtgacaaccagacctgccgggttggttagtctcaatctgccgggcaagctggtcaccttttcgtagcgaactgtcgcggtccacgtactcaccacaggcattttgccgtcaacgacgagggtccttttatagcgaatttgctgcgtgcttggagttacatcatttgaagcgatgtgctcgacctccaccctgccgcgtttgccaagaatgacttgaggcgaactgggattgggatagttgaagaattgctggtaatcctggcgcactgttggggcactgaagttcgataccaggtcgtaggcgtactgagcggtgtcggcatcataactctcgcgcaggcgaacgtactcccacaatgaggcgttaacgacggcctcctcttgagttgcaggcaatcgcgagacagacacctcgctgtcaacggtgccgtccggccgtatccatagatatacgggcacaagcctgctcaacggcaccattgtggctatagcgaacgcttgagcaacatttcccaaaatcgcgatagctgcgacagctgcaatgagtttggagagacgtcgcgccgatttcgctcgcgcggtttgaaaggcttctacttccttatagtgctcggcaaggctttcgcgcgccactagcatggcatattcaggccccgtcatagcgtccacccgaattgccgagctgaagatctgacggagtaggctgccatcgccccacattcagcgggaagatcgggcctttgcagctcgctaatgtgtcgtttgtctggcagccgctcaaagcgacaactaggcacagcaggcaatacttcatagaattctccattgaggcgaatttttgcgcgacctagcctcgctcaacctgagcgaagcgacggtacaagctgctggcagattgggttgcgccgctccagtaactgcctccaatgttgccggcgatcgccggcaaagcgacaatgagcgcatcccctgtcagaaaaaacatatcgagttcgtaaagaccaatgatcttggccgcggtcgtaccggcgaaggtgattacaccaagcataagggtgagcgcagtcgcttcggttaggatgacgatcgttgccacgaggtttaagaggagaagcaagagaccgtaggtgataagttgcccgatccacttagctgcgatgtcccgcgtgcgatcaaaaatatatccgacgaggatcagaggcccgatcgcgagaagcactttcgtgagaattccaacggcgtcgtaaactccgaaggcagaccagagcgtgccgtaaaggacccactgtgccccttggaaagcaaggatgtcctggtcgttcatcggaccgatttcggatgcgattttctgaaaaacggcctgggtcacggcgaacattgtatccaactgtgccggaacagtctgcagaggcaagccggttacactaaactgctgaacaaagtttgggaccgtcttttcgaagatggaaaccacatagtcttggtagttagcctgcccaacaattagagcaacaacgatggtgaccgtgatcacccgagtgataccgctacgggtatcgacttcgccgcgtatgactaaaataccctgaacaataatccaaagagtgacacaggcgatcaatggcgcactcaccgcctcctggatagtctcaagcatcgagtccaagcctgtcgtgaaggctacatcgaagatcgtatgaatggccgtaaacggcgccggaatcgtgaaattcatcgattggacctgaacttgactggtttgtcgcataatgttggataaaatgagctcgcattcggcgaggatgcgggcggatgaacaaatcgcccagccttaggggagggcaccaaagatgacagcggtcttttgatgctccttgcgttgagcggccgcctcttccgcctcgtgaaggccggcctgcgcggtagtcatcgttaataggcttgtcgcctgtacattttgaatcattgcgtcatggatctgcttgagaagcaaaccattggtcacggttgcctgcatgatattgcgagatcgggaaagctgagcagacgtatcagcattcgccgtcaagcgtttgtccatcgtttccagattgtcagccgcaatgccagcgctgtttgcggaaccggtgatctgcgatcgcaacaggtccgcttcagcatcactacccacgactgcacgatctgtatcgctggtgatcgcacgtgccgtggtcgacattggcattcgcggcgaaaacatttcattgtctaggtccttcgtcgaaggatactgatttttctggttgagcgaagtcagtagtccagtaacgccgtaggccgacgtcaacatcgtaaccatcgctatagtctgagtgagattctccgcagtcgcgagcgcagtcgcgagcgtctcagcctccgttgccgggtcgctaacaacaaactgcgcccgcgcgggctgaatatatagaaagctgcaggtcaaaactgttgcaataagttgcgtcgtcttcatcgtttcctaccttatcaatcttctgcctcgtggtgacgggccatgaattcgctgagccagccagatgagttgccttcttgtgcctcgcgtagtcgagttgcaaagcgcaccgtgttggcacgccccgaaagcacggcgacatattcacgcatatcccgcagatcaaattcgcagatgacgcttccactttctcgtttaagaagaaacttacggctgccgaccgtcatgtcttcacggatcgcctgaaattccttttcggtacatttcagtccatcgacataagccgatcgatctgcggttggtgatggatagaaaatcttcgtcatacattgcgcaaccaagctggctcctagcggcgattccagaacatgctctggttgctgcgttgccagtattagcatcccgttgttttttcgaacggtcaggaggaatttgtcgacgacagtcgaaaatttagggtttaacaaataggcgcgaaactcatcgcagctcatcacaaaacggcggccgtcgatcatggctccaatccgatgcaggagatatgctgcagcgggagcgcatacttcctcgtattcgagaagatgcgtcatgtcgaagccggtaatcgacggatctaactttacttcgtcaacttcgccgtcaaatgcccagccaagcgcatggccccggcaccagcgttggagccgcgctcctgcgccttcggcgggcccatgcaacaaaaattcacgtaaccccgcgattgaacgcatttgtggatcaaacgagagctgacgatggataccacggaccagacggcggttctcttccggagaaatcccaccccgaccatcactctcgatgagagccacgatccattcgcgcagaaaatcgtgtgaggctgctgtgttttctaggccacgcaacggcgccaacccgctgggtgtgcctctgtgaagtgccaaatatgttcctcctgtggcgcgaaccagcaattcgccaccccggtccttgtcaaagaacacgaccgtacctgcacggtcgaccatgctctgttcgagcatggctagaacaaacatcatgagcgtcgtcttacccctcccgataggcccgaatattgccgtcatgccaacatcgtgctcatgcgggatatagtcgaaaggcgttccgccattggtacgaaatcgggcaatcgcgttgccccagtggcctgagctggcgccctctggaaagttttcgaaagagacaaaccctgcgaaattgcgtgaagtgattgcgccagggcgtgtgcgccacttaaaattccccggcaattgggaccaataggccgcttccataccaataccttcttggacaaccacggcacctgcatccgccattcgtgtccgagcccgcgcgcccctgtccccaagactattgagatcgtctgcatagacgcaaaggctcaaatgatgtgagcccataacgaattcgttgctcgcaagtgcgtcctcagcctcggataatttgccgatttgagtcacggctttatcgccggaactcagcatctggctcgatttgaggctaagtttcgcgtgcgcttgcgggcgagtcaggaacgaaaaactctgcgtgagaacaagtggaaaatcgagggatagcagcgcgttgagcatgcccggccgtgtttttgcagggtattcgcgaaacgaatagatggatccaacgtaactgtcttttggcgttctgatctcgagtcctcgcttgccgcaaatgactctgtcggtataaatcgaagcgccgagtgagccgctgacgaccggaaccggtgtgaaccgaccagtcatgatcaaccgtagcgcttcgccaatttcggtgaagagcacaccctgcttctcgcggatgccaagacgatgcaggccatacgctttaagagagccagcgacaacatgccaaagatcttccatgttcctgatctggcccgtgagatcgttttccctttttccgcttagcttggtgaacctcctctttaccttccctaaagccgcctgtgggtagacaatcaacgtaaggaagtgttcattgcggaggagttggccggagagcacgcgctgttcaaaagcttcgttcaggctagcggcgaaaacactacggaagtgtcgcggcgccgatgatggcacgtcggcatgacgtacgaggtgagcatatattgacacatgatcatcagcgatattgcgcaacagcgtgttgaacgcacgacaacgcgcattgcgcatttcagtttcctcaagctcgaatgcaacgccatcaattctcgcaatggtcatgatcgatccgtcttcaagaaggacgatatggtcgctgaggtggccaatataagggagatagatctcaccggatctttcggtcgttccactcgcgccgagcatcacaccattcctctccctcgtgggggaaccctaattggatttgggctaacagtagcgcccccccaaactgcactatcaatgcttcttcccgcggtccgcaaaaatagcaggacgacgctcgccgcattgtagtctcgctccacgatgagccgggctgcaaaccataacggcacgagaacgacttcgtagagcgggttctgaacgataacgatgacaaagccggcgaacatcatgaataaccctgccaatgtcagtggcaccccaagaaacaatgcgggccgtgtggctgcgaggtaaagggtcgattcttccaaacgatcagccatcaactaccgccagtgagcgtttggccgaggaagctcgccccaaacatgataacaatgccgccgacgacgccggcaaccagcccaagcgaagcccgcccgaacatccaggagatcccgatagcgacaatgccgagaacagcgagtgactggccgaacggaccaaggataaacgtgcatatattgttaaccattgtggcggggtcagtgccgccacccgcagattgcgctgcggcgggtccggatgaggaaatgctccatgcaattgcaccgcacaagcttggggcgcagctcgatatcacgcgcatcatcgcattcgagagcgagaggcgatttagatgtaaacggtatctctcaaagcatcgcatcaatgcgcacctccttagtataagtcgaataagacttgattgtcgtctgcggatttgccgttgtcctggtgtggcggtggcggagcgattaaaccgccagcgccatcctcctgcgagcggcgctgatatgacccccaaacatcccacgtctcttcggattttagcgcctcgtgatcgtcttttggaggctcgattaacgcgggcaccagcgattgagcagctgtttcaacttttcgcacgtagccgtttgcaaaaccgccgatgaaattaccggtgttgtaagcggagatcgcccgacgaagcgcaaattgcttctcgtcaatcgtttcgccgcctgcataacgacttttcagcatgtttgcagcggcagataatgatgtgcacgcctggagcgcaccgtcaggtgtcagaccgagcatagaaaaatttcgagagtttatttgcatgaggccaacatccagcgaatgccgtgcatcgagacggtgcctgacgacttgggttgcttggctgtgatcttgccagtgaagcgtttcgccggtcgtgttgtcatgaatcgctaaaggatcaaagcgactctccaccttagctatcgccgcaagcgtagatgtcgcaactgatggggcacacttgcgagcaacatggtcaaactcagcagatgagagtggcgtggcaaggctcgacgaacagaaggagaccatcaaggcaagagaaagcgaccccgatctcttaagcataccttatctccttagctcgcaactaacaccgcctctcccgttggaagaagtgcgttgttttatgttgaagattatcgggagggtcggttactcgaaaattttcaattgcttctttatgatttcaattgaagcgagaaacctcgcccggcgtcttggaacgcaacatggaccgagaaccgcgcatccatgactaagcaaccggatcgacctattcaggccgcagttggtcaggtcaggctcagaacgaaaatgctcggcgaggttacgctgtctgtaaacccattcgatgaacgggaagcttccttccgattgctcttggcaggaatattggcccatgcctgcttgcgctttgcaaatgctcttatcgcgttggtatcatatgccttgtccgccagcagaaacgcactctaagcgattatttgtaaaaatgtttcggtcatgcggcggtcatgggcttgacccgctgtcagcgcaagacggatcggtcaaccgtcggcatcgacaacagcgtgaatcttggtggtcaaaccgccacgggaacgtcccatacagccatcgtcttgatcccgctgtttcccgtcgccgcatgttggtggacgcggacacaggaactgtcaatcatgacgacattctatcgaaagccttggaaatcacactcagaatatgatcccagacgtctgcctcacgccatcgtacaaagcgattgtagcaggttgtacaggaaccgtatcgatcaggaacgtctgcccagggcgggcccgtccggaagcgccacaagatgacattgatcacccgcgtcaacgcgcggcacgcgacgcggcttatttgggaacaaaggactgaacaacagtccattcgaaatcggtgacatcaaagcggggacgggttatcagtggcctccaagtcaagcctcaatgaatcaaaatcagaccgatttgcaaacctgatttatgagtgtgcggcctaaatgatgaaatcgtccttctagatcgcctccgtggtgtagcaacacctcgcagtatcgccgtgctgaccttggccagggaattgactggcaagggtgctttcacatgaccgctcttttggccgcgatagatgatttcgttgctgctttgggcacgtagaaggagagaagtcatatcggagaaattcctcctggcgcgagagcctgctctatcgcgacggcatcccactgtcgggaacagaccggatcattcacgaggcgaaagtcgtcaacacatgcgttataggcatcttcccttgaaggatgatcttgttgctgccaatctggaggtgcggcagccgcaggcagatgcgatctcagcgcaacttgcggcaaaacatctcactcacctgaaaaccactagcgagtctcgcgatcagacgaaggccttttacttaacgacacaatatccgatgtctgcatcacaggcgtcgctatcccagtcaatactaaagcggtgcaggaactaaagattactgatgacttaggcgtgccacgaggcctgagacgacgcgcgtagacagttttttgaaatcattatcaaagtgatggcctccgctgaagcctatcacctctgcgccggtctgtcggagagatgggcaagcattattacggtcttcgcgcccgtacatgcattggacgattgcagggtcaatggatctgagatcatccagaggattgccgcccttaccttccgtttcgagttggagccagcccctaaatgagacgacatagtcgacttgatgtgacaatgccaagagagagatttgcttaacccgatttttttgctcaagcgtaagcctattgaagcttgccggcatgacgtccgcgccgaaagaatatcctacaagtaaaacattctgcacaccgaaatgcttggtgtagacatcgattatgtgaccaagatccttagcagtttcgcttggggaccgctccgaccagaaataccgaagtgaactgacgccaatgacaggaatcccttccgtctgcagataggtaccatcgatagatctgctgcctcgcgcgtttcggtgatgacggtgaaaacctctgacacatgcagctcccggagacggtcacagcttgtctgtaagcggatgccgggagcagacaagcccgtcagggcgcgtcagcgggtgttggcgggtgtcggggcgcagccatgacccagtcacgtagcgatagcggagtgtatactggcttaactatgcggcatcagagcagattgtactgagagtgcaccatatgcggtgtgaaataccgcacagatgcgtaaggagaaaataccgcatcaggcgctcttccgcttcctcgctcactgactcgctgcgctcggtcgttcggctgcggcgagcggtatcagctcactcaaaggcggtaatacggttatccacagaatcaggggataacgcaggaaagaacatgtgagcaaaaggccagcaaaaggccaggaaccgtaaaaaggccgcgttgctggcgtttttccataggctccgcccccctgacgagcatcacaaaaatcgacgctcaagtcagaggtggcgaaacccgacaggactataaagataccaggcgtttccccctggaagctccctcgtgcgctctcctgttccgaccctgccgcttaccggatacctgtccgcctttctcccttcgggaagcgtggcgctttctcatagctcacgctgtaggtatctcagttcggtgtaggtcgttcgctccaagctgggctgtgtgcacgaaccccccgttcagcccgaccgctgcgccttatccggtaactatcgtcttgagtccaacccggtaagacacgacttatcgccactggcagcagccactggtaacaggattagcagagcgaggtatgtaggcggtgctacagagttcttgaagtggtggcctaactacggctacactagaaggacagtatttggtatctgcgctctgctgaagccagttaccttcggaaaaagagttggtagctcttgatccggcaaacaaaccaccgctggtagcggtggtttttttgtttgcaagcagcagattacgcgcagaaaaaaaggatctcaagaagatcctttgatcttttctacggggtctgacgctcagtggaacgaaaactcacgttaagggattttggtcatgagattatcaaaaaggatcttcacctagatccttttaaattaaaaatgaagttttaaatcaatctaaagtatatatgagtaaacttggtctgacagttaccaatgcttaatcagtgaggcacctatctcagcgatctgtctatttcgttcatccatagttgcctgactccccgtcgtgtagataactacgatacgggagggcttaccatctggccccagtgctgcaatgataccgcgagacccacgctcaccggctccagatttatcagcaataaaccagccagccggaagggccgagcgcagaagtggtcctgcaactttatccgcctccatccagtctattaattgttgccgggaagctagagtaagtagttcgccagttaatagtttgcgcaacgttgttgccattgctgcaggggggggggggggggggttccattgttcattccacggacaaaaacagagaaaggaaacgacagaggccaaaaagctcgctttcagcacctgtcgtttcctttcttttcagagggtattttaaataaaaacattaagttatgacgaagaagaacggaaacgccttaaaccggaaaattttcataaatagcgaaaacccgcgaggtcgccgccccgtaacctgtcggatcaccggaaaggacccgtaaagtgataatgattatcatctacatatcacaacgtgcgtggaggccatcaaaccacgtcaaataatcaattatgacgcaggtatcgtattaattgatctgcatcaacttaacgtaaaaacaacttcagacaatacaaatcagcgacactgaatacggggcaacctcatgtcccccccccccccccccctgcaggcatcgtggtgtcacgctcgtcgtttggtatggcttcattcagctccggttcccaacgatcaaggcgagttacatgatcccccatgttgtgcaaaaaagcggttagctccttcggtcctccgatcgttgtcagaagtaagttggccgcagtgttatcactcatggttatggcagcactgcataattctcttactgtcatgccatccgtaagatgcttttctgtgactggtgagtactcaaccaagtcattctgagaatagtgtatgcggcgaccgagttgctcttgcccggcgtcaacacgggataataccgcgccacatagcagaactttaaaagtgctcatcattggaaaacgttcttcggggcgaaaactctcaaggatcttaccgctgttgagatccagttcgatgtaacccactcgtgcacccaactgatcttcagcatcttttactttcaccagcgtttctgggtgagcaaaaacaggaaggcaaaatgccgcaaaaaagggaataagggcgacacggaaatgttgaatactcatactcttcctttttcaatattattgaagcatttatcagggttattgtctcatgagcggatacatatttgaatgtatttagaaaaataaacaaataggggttccgcgcacatttccccgaaaagtgccacctgacgtctaagaaaccattattatcatgacattaacctataaaaataggcgtatcacgaggccctttcgtcttcaagaattggtcgacgatcttgctgcgttcggatattttcgtggagttcccgccacagacccggattgaaggcgagatccagcaactcgcgccagatcatcctgtgacggaactttggcgcgtgatgactggccaggacgtcggccgaaagagcgacaagcagatcacgcttttcgacagcgtcggatttgcgatcgaggatttttcggcgctgcgctacgtccgcgaccgcgttgagggatcaagccacagcagcccactcgaccttctagccgacccagacgagccaagggatctttttggaatgctgctccgtcgtcaggctttccgacgtttgggtggttgaacagaagtcattatcgtacggaatgccaagcactcccgaggggaaccctgtggttggcatgcacatacaaatggacgaacggataaaccttttcacgcccttttaaatatccgttattctaataaacgctcttttctcttag

SEQ ID NO: 12 - DNA, 61296 bp, artificial
  PHP38462
gtttacccgccaatatatcctgtcaaacactgatagtttaaactgaaggcgggaaacgacaatctgatcatgagcggagaattaagggagtcacgttatgacccccgccgatgacgcgggacaagccgttttacgtttggaactgacagaaccgcaacgttgaaggagccactcagcaagctggtacgattgtaatacgactcactatagggcgaattgagcgctgtttaaacgctcttcaactggaagagcggttaccagagctggtcacctttgtccaccaagatggaactgcggccgctcattaattaagtcaggcgcgcctctagttgaagacacgttcatgtcttcatcgtaagaagacactcagtagtcttcggccagaatggccatctggattcagcaggcctagaaggccatttaaatcctgaggatctggtcttcctaaggacccgggatatcgctatcaactttgtatagaaaagttgggccgaattcgagctcggtacggccagaatggcccggaccgggttaccgaattcgagctcggtaccgggcggccgaagctggccttctaggcccggaccgggtgacccggaccggaattcgagctccaccgcggtggcggccgcattcgcaaaacacacctagactagatttgttttgctaacccaattgatattaattatatatgattaatatttatatgtatatggatttggttaatgaaatgcatctggttcatcaaagaattataaagacacgtgacattcatttaggataagaaatatggatgatctctttctcttttattcagataactagtaattacacataacacacaactttgatgcccacattatagtgattagcatgtcactatgtgtgcatccttttatttcatacattaattaagttggccaatccagaagatggacaagcctagggtaacctatcgtctattcattttgccccctttgaataaaagaatgcaacactttctcaacatggtacgcatcaactccaacgctagctgatgctacctttctgccccgatatcctgtcatgcatgctagtacatgttttcttttgtatgccacacaatttaattactgtagatgctatgacgacatttaatttgctgttgctgagcatcaggagcctcgaggaatcttgtcgtgcagcgcctgctgtacttcgatttggccttttcgtctgtatcgccatcaggcgaataggggatacaagtaagtggctcttttccatcaaacatcaaagattagcatgcgataatggtacaaaatagtgaggatatatattgtctgacagatgcatgtatgaaatttgacgtatgatgccagatggggcttgggcttgtattgtatgcaagccctgtatgtttgtaataatattcatatatctcaaatttctgatttttttggaagacccaaaattgcaggagaaatagaaatatgtcaacttgaggttagatgcatacttgcccttacgtttcctctggagtgggctgatgatatatgaatgcaggtcctagatctcttgacggtgcttgagggccatacacgagaggaagagaactaggtggctctgcagagacctcatcgaaactaagttctaagccacagcacagcaagctgagacgcctccaggttccaggagctcgatgaggctctgcagagacatcccgttctctacctcatagcacatggcaacccagcagaagccaccctccctcctctcccttcccctacgactgtggtgtggtttctttgcttctctgtgtggagggggatccatggcggcggcggccggggagtgggccgggaagcgcgaacgaagctggagatggttggaccggcgcggcgtgttgctcgtgctgctcctctgctgcgagttgattgatcaatgcagggcgccggccggtggcttcaaatagggatggggagttggcgagtgtgtggtcggcgtgtgcaacgggattggaaaggcatgcatgtgatcggcggtaagggtagccgagacgtgcgcgcggctgtggctacgctgcttttggctgggatcgctgctgtggacgtactttgtcactgcgcacttgcctgcttgtgttattccgctggctaatattgcctgtttgcaggacgtggagaggggtgtctgctagtgctagctagtggtaaggatggggacgatgcttcaaataactcctcgtgttcttctctagtctaactaaacgaactaaattaaaaaaataagaaagaaattgtttatttagtttattaagttagactagagaaaaaccgcgcaagtatgcatttagagtaccatcttcattcttagctagtggtaaccgcaaaggggaccgggagagctgcggcgcaccttgctcctggatcgtttttggcttggctttgctgctgttaacgtgctttgtcactgctcacctgccttcttgtgttattcggttggctgatgggtttgcaggatggggagaggggtgtctgtttgcagtcaaggccggattctggggatcggtagaatttggaggtttgcttgcacgcgatgtggagagaggtgtctgttagcaacggaggatgcatggcgctggaggaaggctttgcagggtgtggaggagagggtgcctgttatccagtaatgttaatgttaggaacatagatgtcctatatccatgtaaactgtggaaacagaacttaatttccttaggagaccgggaaacaaaaaatgaacttgtggttaaggatatggactataattttgtggttcaaagaaaggtattggtatacatggctgccgtagggataagggtcatacatggctgccgtagggataagggtgttgttactctaccaagggcaccatacaggtggctgcacagcattcaggcgctgccaaatctagcgcgcacatcactgggtcaagccgacacagatttggacaatacgatgtgtagcagctggtggtggtgaagatatgcggatttaagagagaggtggatttgggttgggaggagcaacttgcatcgtcgtggatctccacacaaaaaagaagaattggaaatgtataatactatacatatgcttaaatgaaagtatttactgaattgtggatcgatgcattaattgtcatcacaagtgaaaattaggtaataatgagtactagttaatagttgagcacggaaaaagcaagcttggatccgatatcgatgggccctggccgaagcttggtcacccggtccgggcctagaaggccagcttcaagtttgtacaaaaaagcaggctccggccagaatggcccggaccgggttaccgaattcgagctcggtaccaggtttcgaggaagaagccacgaagtgtgtttgatactacatgtgttcaggaaactacatgtatatgtttaatactaatatgatgtggaattttacaatggacagtgtcactaggctttgtcgtttacgaattaccatcttagtctctatgattaggtgaagtgtttagaaacttttccatatagtctaggcttgctctttgggatcatgcgaggagccacttaaataaatttaagagtaaaatattatgtaaagtatgagtccaaaatcaatttttcttgacgaaattattctattattttgttccttataagtctagtcaactgtcgtaaatcagtataccttagacgataagcctaaattgattacgaaaggtgcttgattcttaattggttgtccatcaacgttgaaacgtattttctcaagtaaatacatcttttgagaaaacatatacaacttaggatgacatatcttgcgacttgcatgaaggcaggttacaattacgtttcaagctaagattttctctaaatcggtagtaggaaagttttaacggtcgctgaaagtttatgtttttatcgactgaccggatcaaccgataattaaaaaaattattttgaaaatttgatgtcacaaataaataagaaatttgaatttttttttatagagtttttgcatagtaatctttgtattttacttttttttttaaatcatgtttagacaaatagaaatggcatgaataatatgtgagatattgaaagtgattagtttgaatgaaattaattttaagaaacttgagtttgattgtttttctttaggcaatacaaaatttgatttggagtgcaaataaaatgtcgtcttgtttagtatgctcggactcttagataagcatgcttacctctttggaatgacgtcaatttggatgattttatatacgttcgcaatgacgtcgactgaatcattttatacgattatagtcatgattaaactagactcagttggtaagtatgaaaaaatgggtctaaattaacgtggcacacctaaagattcggtactaaaataaagaaaacctagctaggaaaactaaatatctcaagcatacaatttttattttcttggatgatgatgtcaatgcaggtcatttatgtattaagtattaaccaatactagctagggtttcgaatccaacaagtcagtttctcatctcacggacaatcatgaacttgagcttgaaaaggctcattataaacaaagtaatagcccaaatcataagtggcggaaagattaagagtagtcctggacgttcggttatctaattcggctttggttcgtatacattcggttatcgtttttttttgttctaaagtttagtatttattcgatttttgaaattttggttcgattttggttttgttccagttttttcggttttaaaatttggtatccattcggttattttgctttgaatattttgggatatttcggttgtttttgaatatttgtggttattttcgagtatttttactattttatataaatttttaagtatttttaattatttaatctagaaattattaatatttttgacaatataattatatttcggatatttttggttacattaaatattttgattcggtttcagttctttcagttataggatttagttttcattcggttatttttaaattttcggtttggttcgattatttttgctttggttttggtcgggtacatacagtttgaattatttgcccacacctaattaagagcatcaactaaagataatcatgagtcttgggctttacaaggcccattaagatcaaagtgaaatgcccaaatcatatatggcaaccagtggaaagcttaagagcatcatcaactaaacaagagccattttctcagttgtttattcattttctccatcgtacatagaaagagacaactagtcataactccaattttttgaaccttcccactccaacaatgccgattcaagtagcgagagcttaacaatcagcaataatggtagaaaaacgagtaggtccaaagatatgcaagactcggaataactttcagtttctgagtaacacaaagtattgatgatggattgtgttattcaccatgaaagtaacggatagagaaatgttgcttgagaatgagactgacaaatcagactgtcatattcttgtgggttttctctatgcaggtgaaaccaaaagtacaagggtactatgtaccttcagcttagaaatgatgtgttttctacacttttctcttcttttttttcttttcatctcacatgaatcaaaaagagaaagcttaattacattaaaggttgatgtgatatttactttctaaatatttgctagaagaaattataatgataacattaaattaagttatagtcatttctatttcggttgtctcccactttctgctatgcttttacaacaacagttcaagatttggaatcgttttctttctccaccaatcgtagtaatacttctttttgtgtttgttgaaattttgcaagattctctcttcctctggttaatacacataacttacttggtaagcttggctgcattttcttttcaagcttttaatcaaagactcactagaaattgcaaaggcaaacataaaattatgtgatcaaactcctactgtgagtttttggttacaaacaaaagttaaaaacaaaagcttgatatttaaaagataaactcaacacatatgcatttgactggcgcacagaagacaattcaagacttgggaaaacagtgagccatcaaaatcgtcagataattcagggaatatattgaatgtggagatgtggtaatcacactattgcacacaaagagtggcaaacaagcggcgcccttggtttggtatagtaagagacaattgttttggactgtttgtgttgccatattcacaaaaatactattgagctatgtatgttaaacattatggtcaatgagtagtagtgaacattcaagtttttttttttttccacttcaagtttttcatcttattattatttttcgttgtgatgcagtagtacggcccatcttcaccagtagtatatcaaagccgaaacagatgacaaattgtttaacatgcacttggattattattgagagttgaaatacaaaggcccgttacaagcccaaacgaaggtacataaaagaaaagcagaaaatgaaaacgaaatcgatagggataagtttttccaactgacggaaacacaaactacaccaggtgaaatagatcacctcccaagtgcatgagacacgaaccaaccacttatcatcagatcacaaaaacctaggcgccctagccagtgttctgcatgccggcggcgatgcccttcatggtgaggatgagcgtgtcttccaggccgggcgggtactcgctcgcggggttcagcttgaccagtccggcgggcttgttctcgtcggcgaactccttggacagcggcggctggggcgtcaccttgaagttggggtcccttatccgcttcagcgtgtaggcctggaacacgttcagggtggtgatgtaggggttgcgcagcaccagcccctgcttcaggaatggatcgccttcaagaatatccttgtgcccagcgatctgcacaaagtggagtagtcagtcatcgatcaggaaccagacaccagacttttattcatacagtgaagtgaagtgaagtgcagtgcagtgagttgctggtttttgtacctggaggagaagctgctgtgtctccacgtatttgtccctgagctgcttcccaaagggcttgagttcttctgccacaagcagctcgtcatacaagccggcaatgccggggtctcccttggcgaaaaccatctccagcaggtccagggtgaccctgaagaatggccactcgttgtacatctctttgaggacctggaagttcttgacgtccttgtcgatggcgaacttgaatgcggcgccgactcccagccacacggggaggtggaacctggtctgggtccacgagaagatccaggggatggcgcgcagggtcgtgatgccgccgccgggcctcctcttggctggccggctgccgatgttcatcctcccgtactcggtctccggtgtagcctgatagtgagtgacgcacaaacgctcgaatgaatgaaaagaacgatcgacatggatgaattcgatcgtcacaaagcaatgggcaatggcagcataccgatctgaagtactcgacgaagcgcggctccttgacgacgacggagcggtactcctccgtggccacgaccgccatctcgtccatgagcttgcgccactcgggcttgggagagaccggcgggtgcatgccgtgctccagcgtggcggccgtgaagcgctgcagagtctggaagcacaggtgctcctccccgaagcagaactcgatgacctcgccctgcaccgtcacacggatggacccgttgatggtgtccggcggttgggacaggatggcaaggtgcgtgggcccgccacccctgcccacggtgcctccgcggccgtggaacaaggtgagcttgacgccgtagcgcttggccacctgcgccatctcctcctgcgccttgtacagctgccacgccgcggacaggcggccggcgtccttgccggagtcggagtagccgaccatgacctgctgcttgcccttgatccggtccatgtaccagtccaccgagaagaggcgctccacggacgcgggcgccgactgcaggtcggccagcctctcgaacagcggcaccacgggcagcggctggcgcacgccgcactcgcgctgcaggagctctacggcgagcacgtccgagggggccgtcgccatagagatgatgtaggggccgaagctgtcgggcgggagctccgcgaggacgtggaacgcgccgatgacgtcggcgatctcgtcggtctggggaaggtccgggggcagcagcgggcgcttgcccttcagctccgacagcagccactcctgcctcttgtcctcggaccactcgcggtacgacccgatgccgaggtgcgtggtgatggcgtcgatcacgtcggtgtgccgctccgactcctgccggatgtccagcttcaccagggagagcccgaacgtgaaaacctggcgcaggaggtccaggaggctcccgtccgcgatggccttgtcgccgcagtcacacagtgatttgtagcacagctcaagtggctcaaggaactgcatgcatgcacgacagtagtgattttttttttgttagttgcagtgctgatgtcatactatgaatatatataatatatatacatgacgatatttacctcttcgatactggtaaatgacgcttccgctgaaatctcgctcacgcctgacgcaagcagatggcgagcacgctcgcgtgtgttgtacagcttgtcccttacatggcctagtatcacccggtagggctcgtttggaggaatttgcttccagaattctgcgccagcaaatacacttcagaaaagatgccaaaagagccctcaaattaatttgaaaacactagtggagacttttgcaaaaggctgtacggcaggcaaaaattaagcaaacataaatgcttctgtttgtggttacctatgtaatacttggtaactttggaaccagacgaactgtggagctcttcggcacgaacacgaagctcatcgttgcagcgccacatagagagctacagatatatcagacgatgcatgcatgagagttctggtatggaccggagacagcaaaaaacagggcaagcaaaaaaatcatagagcattcaatcaaacaaatctgcagtatggatgtacagtacctcaaacatcagctcttcaatctgatcgatgtacaagtttgcagccatcattctggccagcaagcatacatctcttgtcacctccggggtaactcttggatttcctatatagcgatagattgcaaagatatacaggcttagaaaaaacatataattctgtatatataattttctggcgagaaaagaaaaacgttagccttgaatattgacaggacaagtactgatataatataagcactctttgatatataaaataatactacacgtataattctgtgatataaaaaattcaacaagttaggttccaggttgcaatataaagatttgattaaattatgcttatatgttgtgctagcatgtatggatgataaatttttattagtgaggtgtactaaataatttctattttaaaattctagctcctgagagctcgaaatgatagactagtttttctgaacatctattgcagtcagagtaaagcaggaaggtttctctcaagctgaaagacagagagctcctgccactttattgaaaagggtaggcagaaatgtaccatcgcggtcaccacccatccaagaagagaaccgaatgagagaaacattgtagggaaggcgctcattgatgccgatattcttcagggctgtatccacacggcgcaagaacttaggcacgcccttccatacagtctcatggatgtagctcatcccatagcgcatttcgtcctggggggtgggttgtgccctcctgatttcatcggttctgaaggctgcttggatctgtgaacacccaagaaaaggaattagaactaaacaacccaaacaacaaaaataccactttggtggcttgaagcagtaaacttctcaggtggtctgcatcatatatatgcaccatgagagagacgctctttaccgagtgctcagtgatgacattatgactcgtctgaaatttgtaacactaggaacttgagcatagcctagctaattgagggtgtggagttaaggctatctaggtttgattcctcatcaaggagaaactggatgccctacttgttaggaaaatataatgatgagtacaacaacttgattacaactaaaccattaatgcatctgtggtaccgaagttctactcaaatggctctatatgagtaagagatctttgtacaaaatgatcttttttaagtaaaaggaaaatgctttgagcacagctggagaatagcatataaataattcagtgtagttttcatcaagtggtcttcaacattgaatcttaagtcaagtcggcctcatataaataattctgttatacatgtagcagttctctcattgcattgttaaaacataaatgtgcagtctagttctttcctgattaggttagtttctactttggagtttgcaaagacagtttaaatagtggaaaagtttggttgtttattaccttagcttgataataatgaatatttatttatatgtgttttaatgggagaacctgacctgacttgacatataaattgaagatttctctggcgcactaacttacacgtgtcgtgctcgatgtcttgcaagctcatgagtccacgtgtactgtgcatgtgttctattctatctctatcaaagaatgaatgtctcttgataaagttcttgcattccctggtgtgaaatgtaatatgtacgtacctcgcgctgcaacgcttcgtccagctcctgcttgtcgtcgtcagtgatgtccttggcattcagctgggtcagacaattccggatcctgcagcgacaagaccgacatttttatttatcaaaaataataataatggttaagacttaagggtatataacgtgagtagcatatcgatcaagccattgaaaaatatatacccggcatttttttgcaggagcgagcggcgggcggactgtgtgggatgcgcggtgaagacgaggtcgatggtctggttcttgagcgcctcgaacacctcctcgggggacttgccgacctcggacacgaggcgcttgagcgtctcctcgatgtcggactcggtggtggcggagccctcgtcggcgaacccacctttcttgagcttgctgttgcggcggcggcgcgcgatctgcacctcctcggcgaggttggcgaggttgagcatgtgcaggatggagctcgccacgaggatggcgtcggcgggggccagccccgtgagcttggcgccgagctcgcccagcttcgtcgtgtctcctttgccctcgtagtcggctgagacctcgtagcactcctggacctgcatgcatgcattacagtaagcactggcggggagacgtacgagcagtgccgcgcgcaggcggcaaccggtcgaagaagaaatgggcggcggcagtggttagttacaaattcgcgaaggctgggcccgtggaggtcctggaggatgttgaggaagcggtcgacgagcagcgcatcgtactcgatgagcttgtcgtcctcggagaccttgcctgggaccagctgacggagctgcgcgtcgatggagtggtgcttctcgccggggccgggagccttggtcgacgccatggcgcggcgggaagctaagcacggaagcgagatggttggagcggcacggcgtgctgctcgtgctgctgcgatgcgattggtgatcaatgcagtgcgcgggtgggttcaaatagggatggggagtcgttggcgggcgggtgtgtgtgtggctgtgcacgggaacgggcggccctcggcgttcggaaaggcgcggccttgggcatgtgatcggcggtaaccgcaacggaaccggctgcggctgaggctcctttttggcttggcttgctgctgttagcggccggaggggatgtggagaggggtgtctgctactgctggcggcaatcgcaaggggacctggagagctgcggctgcggcttgggcttgctcctccttgctcctttttggcttggctcggtgctgttgacgtgctttgtcactgctcacctgccttcttgtgttattccgttggctaattgggtagcaggatgtggagagggcgtcccttagcagttaatgctggattcgggggatcgcaagaatttggaggaatgctttgcaggatgtggagagggcgtctgttagcaagtaggctgcatcggagtgaagaatctggagggatgtggcgagggtgtctgtttgcaggatgtggttgagggtgcagtgaggcggctgtggctaagagtcgtctttgtagataattttttgtttccattaacatttaaattaaatttatgattttaaaatttagtttcctaggaggataaggaaaaaaaaaagtgaacctgtggttaggaactcggcattttattgttccaaataagtgttcaacctgaacaagaagtgccgctataataaattattgtggttcaagaaaaagtatatttaattcttggtatgcatacatggctattgtagggataaggggtgtcattctacgaagggcaccatacatatagggataaggatgttgttctaccaagggcaccgtacaggtgtctcctccattggcgccgaccgtgcacaagccaacaaagatatgcacgatgcgatgtgttgttggcacttggcagcggtgaacatgcacggattgaagagagaggtggatttgggttgggatatccacacaaaaagaagaattttaaaatatagactgtgtgcttaaatgtacatatttacagaattatggtctaatgcatttgttatcacaattagaaatgagataatgctaggtaattgaaaatagaaaaaccatcgaatgaccttacatttatattagtagctaaccacgtgtcctaacaccattacatcgctagatcctcgacatactatcaacattgtgcattacatcgagctaagtaaagaactgatcggccaggatccgatatcgatgggccctggccgaagcttggtcacccggtccgggcctagaaggccgatctcccgggcacccagctttcttgtacaaagtggccgttaacggatcggccagaatggcccggaccgaagctggccgctctagaactagtggatctcgatgtgtagtctacgagaagggttaaccgtctcttcgtgagaataaccgtggcctaaaaataagccgatgaggataaataaaatgtggtggtacagtacttcaagaggtttactcatcaagaggatgcttttccgatgagctctagtagtacatcggacctcacatacctccattgtggtgaaatattttgtgctcatttagtgatgggtaaattttgtttatgtcactctaggttttgacatttcagttttgccactcttaggttttgacaaataatttccattccgcggcaaaagcaaaacaattttattttacttttaccactcttagctttcacaatgtatcacaaatgccactctagaaattctgtttatgccacagaatgtgaaaaaaaacactcacttatttgaagccaaggtgttcatggcatggaaatgtgacataaagtaacgttcgtgtataagaaaaaattgtactcctcgtaacaagagacggaaacatcatgagacaatcgcgtttggaaggctttgcatcacctttggatgatgcgcatgaatggagtcgtctgcttgctagccttcgcctaccgcccactgagtccgggcggcaactaccatcggcgaacgacccagctgacctctaccgaccggacttgaatgcgctaccttcgtcagcgacgatggccgcgtacgctggcgacgtgcccccgcatgcatggcggcacatggcgagctcagaccgtgcgtggctggctacaaatacgtaccccgtgagtgccctagctagaaacttacacctgcaactgcgagagcgagcgtgtgagtgtagccgagtagatcccccggtcgccaccatggcctcctccgagaacgtcatcaccgagttcatgcgcttcaaggtgcgcatggagggcaccgtgaacggccacgagttcgagatcgagggcgagggcgagggccgcccctacgagggccacaacaccgtgaagctgaaggtgaccaagggcggccccctgcccttcgcctgggacatcctgtccccccagttccagtacggctccaaggtgtacgtgaagcaccccgccgacatccccgactacaagaagctgtccttccccgagggcttcaagtgggagcgcgtgatgaacttcgaggacggcggcgtggcgaccgtgacccaggactcctccctgcaggacggctgcttcatctacaaggtgaagttcatcggcgtgaacttcccctccgacggccccgtgatgcagaagaagaccatgggctgggaggcctccaccgagcgcctgtacccccgcgacggcgtgctgaagggcgagacccacaaggccctgaagctgaaggacggcggccactacctggtggagttcaagtccatctacatggccaagaagcccgtgcagctgcccggctactactacgtggacgccaagctggacatcacctcccacaacgaggactacaccatcgtggagcagtacgagcgcaccgagggccgccaccacctgttcctgtagcggcccatggatattcgaacgcgtaggtaccacatggttaacctagacttgtccatcttctggattggccaacttaattaatgtatgaaataaaaggatgcacacatagtgacatgctaatcactataatgtgggcatcaaagttgtgtgttatgtgtaattactagttatctgaataaaagagaaagagatcatccatatttcttatcctaaatgaatgtcacgtgtctttataattctttgatgaaccagatgcatttcattaaccaaatccatatacatataaatattaatcatatataattaatatcaattgggttagcaaaacaaatctagtctaggtgtgttttgcgaatgcggccgccaccgcggtggagctcgaattccggtccgggcctagaaggccagcttcggccgccccgggcaactttattatacaaagttgatagatatcggaccgattaaactttaattcggtccgaagcttgcatgcctgcagtgcagcgtgacccggtcgtgcccctctctagagataatgagcattgcatgtctaagttataaaaaattaccacatattttttttgtcacacttgtttgaagtgcagtttatctatctttatacatatatttaaactttactctacgaataatataatctatagtactacaataatatcagtgttttagagaatcatataaatgaacagttagacatggtctaaaggacaattgagtattttgacaacaggactctacagttttatctttttagtgtgcatgtgttctcctttttttttgcaaatagcttcacctatataatacttcatccattttattagtacatccatttagggtttagggttaatggtttttatagactaatttttttagtacatctattttattctattttagcctctaaattaagaaaactaaaactctattttagtttttttatttaataatttagatataaaatagaataaaataaagtgactaaaaattaaacaaataccctttaagaaattaaaaaaactaaggaaacatttttcttgtttcgagtagataatgccagcctgttaaacgccgtcgacgagtctaacggacaccaaccagcgaaccagcagcgtcgcgtcgggccaagcgaagcagacggcacggcatctctgtcgctgcctctggacccctctcgagagttccgctccaccgttggacttgctccgctgtcggcatccagaaattgcgtggcggagcggcagacgtgagccggcacggcaggcggcctcctcctcctctcacggcaccggcagctacgggggattcctttcccaccgctccttcgctttcccttcctcgcccgccgtaataaatagacaccccctccacaccctctttccccaacctcgtgttgttcggagcgcacacacacacaaccagatctcccccaaatccacccgtcggcacctccgcttcaaggtacgccgctcgtcctcccccccccccctctctaccttctctagatcggcgttccggtccatgcatggttagggcccggtagttctacttctgttcatgtttgtgttagatccgtgtttgtgttagatccgtgctgctagcgttcgtacacggatgcgacctgtacgtcagacacgttctgattgctaacttgccagtgtttctctttggggaatcctgggatggctctagccgttccgcagacgggatcgatttcatgattttttttgtttcgttgcatagggtttggtttgcccttttcctttatttcaatatatgccgtgcacttgtttgtcgggtcatcttttcatgcttttttttgtcttggttgtgatgatgtggtctggttgggcggtcgttctagatcggagtagaattctgtttcaaactacctggtggatttattaattttggatctgtatgtgtgtgccatacatattcatagttacgaattgaagatgatggatggaaatatcgatctaggataggtatacatgttgatgcgggttttactgatgcatatacagagatgctttttgttcgcttggttgtgatgatgtggtgtggttgggcggtcgttcattcgttctagatcggagtagaatactgtttcaaactacctggtgtatttattaattttggaactgtatgtgtgtgtcatacatcttcatagttacgagtttaagatggatggaaatatcgatctaggataggtatacatgttgatgtgggttttactgatgcatatacatgatggcatatgcagcatctattcatatgctctaaccttgagtacctatctattataataaacaagtatgttttataattattttgatcttgatatacttggatgatggcatatgcagcagctatatgtggatttttttagccctgccttcatacgctatttatttgcttggtactgtttcttttgtcgatgctcaccctgttgtttggtgttacttctgcaggtcgactttaacttagcctaggatccacacgacaccatgtcccccgagcgccgccccgtcgagatccgcccggccaccgccgccgacatggccgccgtgtgcgacatcgtgaaccactacatcgagacctccaccgtgaacttccgcaccgagccgcagaccccgcaggagtggatcgacgacctggagcgcctccaggaccgctacccgtggctcgtggccgaggtggagggcgtggtggccggcatcgcctacgccggcccgtggaaggcccgcaacgcctacgactggaccgtggagtccaccgtgtacgtgtcccaccgccaccagcgcctcggcctcggctccaccctctacacccacctcctcaagagcatggaggcccagggcttcaagtccgtggtggccgtgatcggcctcccgaacgacccgtccgtgcgcctccacgaggccctcggctacaccgcccgcggcaccctccgcgccgccggctacaagcacggcggctggcacgacgtcggcttctggcagcgcgacttcgagctgccggccccgccgcgcccggtgcgcccggtgacgcagatctgagtcgaaacctagacttgtccatcttctggattggccaacttaattaatgtatgaaataaaaggatgcacacatagtgacatgctaatcactataatgtgggcatcaaagttgtgtgttatgtgtaattactagttatctgaataaaagagaaagagatcatccatatttcttatcctaaatgaatgtcacgtgtctttataattctttgatgaaccagatgcatttcattaaccaaatccatatacatataaatattaatcatatataattaatatcaattgggttagcaaaacaaatctagtctaggtgtgttttgcgaatgcggccgccaccgcggtggagctcgaattcattccgattaatcgtggcctcttgctcttcaggatgaagagctatgtttaaacgtgcaagcgctactagacaattcagtacattaaaaacgtccgcaatgtgttattaagttgtctaagcgtcaatttgtttacaccacaatatatcctgccaccagccagccaacagctccccgaccggcagctcggcacaaaatcaccactcgatacaggcagcccatcagtccgggacggcgtcagcgggagagccgttgtaaggcggcagactttgctcatgttaccgatgctattcggaagaacggcaactaagctgccgggtttgaaacacggatgatctcgcggagggtagcatgttgattgtaacgatgacagagcgttgctgcctgtgatcaaatatcatctccctcgcagagatccgaattatcagccttcttattcatttctcgcttaaccgtgacaggctgtcgatcttgagaactatgccgacataataggaaatcgctggataaagccgctgaggaagctgagtggcgctatttctttagaagtgaacgttgacgatcgtcgaccgtaccccgatgaattaattcggacgtacgttctgaacacagctggatacttacttgggcgattgtcatacatgacatcaacaatgtacccgtttgtgtaaccgtctcttggaggttcgtatgacactagtggttcccctcagcttgcgactagatgttgaggcctaacattttattagagagcaggctagttgcttagatacatgatcttcaggccgttatctgtcagggcaagcgaaaattggccatttatgacgaccaatgccccgcagaagctcccatctttgccgccatagacgccgcgccccccttttggggtgtagaacatccttttgccagatgtggaaaagaagttcgttgtcccattgttggcaatgacgtagtagccggcgaaagtgcgagacccatttgcgctatatataagcctacgatttccgttgcgactattgtcgtaattggatgaactattatcgtagttgctctcagagttgtcgtaatttgatggactattgtcgtaattgcttatggagttgtcgtagttgcttggagaaatgtcgtagttggatggggagtagtcatagggaagacgagcttcatccactaaaacaattggcaggtcagcaagtgcctgccccgatgccatcgcaagtacgaggcttagaaccaccttcaacagatcgcgcatagtcttccccagctctctaacgcttgagttaagccgcgccgcgaagcggcgtcggcttgaacgaattgttagacattatttgccgactaccttggtgatctcgcctttcacgtagtgaacaaattcttccaactgatctgcgcgcgaggccaagcgatcttcttgtccaagataagcctgcctagcttcaagtatgacgggctgatactgggccggcaggcgctccattgcccagtcggcagcgacatccttcggcgcgattttgccggttactgcgctgtaccaaatgcgggacaacgtaagcactacatttcgctcatcgccagcccagtcgggcggcgagttccatagcgttaaggtttcatttagcgcctcaaatagatcctgttcaggaaccggatcaaagagttcctccgccgctggacctaccaaggcaacgctatgttctcttgcttttgtcagcaagatagccagatcaatgtcgatcgtggctggctcgaagatacctgcaagaatgtcattgcgctgccattctccaaattgcagttcgcgcttagctggataacgccacggaatgatgtcgtcgtgcacaacaatggtgacttctacagcgcggagaatctcgctctctccaggggaagccgaagtttccaaaaggtcgttgatcaaagctcgccgcgttgtttcatcaagccttacagtcaccgtaaccagcaaatcaatatcactgtgtggcttcaggccgccatccactgcggagccgtacaaatgtacggccagcaacgtcggttcgagatggcgctcgatgacgccaactacctctgatagttgagtcgatacttcggcgatcaccgcttccctcatgatgtttaactcctgaattaagccgcgccgcgaagcggtgtcggcttgaatgaattgttaggcgtcatcctgtgctcccgagaaccagtaccagtacatcgctgtttcgttcgagacttgaggtctagttttatacgtgaacaggtcaatgccgccgagagtaaagccacattttgcgtacaaattgcaggcaggtacattgttcgtttgtgtctctaatcgtatgccaaggagctgtctgcttagtgcccactttttcgcaaattcgatgagactgtgcgcgactcctttgcctcggtgcgtgtgcgacacaacaatgtgttcgatagaggctagatcgttccatgttgagttgagttcaatcttcccgacaagctcttggtcgatgaatgcgccatagcaagcagagtcttcatcagagtcatcatccgagatgtaatccttccggtaggggctcacacttctggtagatagttcaaagccttggtcggataggtgcacatcgaacacttcacgaacaatgaaatggttctcagcatccaatgtttccgccacctgctcagggatcaccgaaatcttcatatgacgcctaacgcctggcacagcggatcgcaaacctggcgcggcttttggcacaaaaggcgtgacaggtttgcgaatccgttgctgccacttgttaacccttttgccagatttggtaactataatttatgttagaggcgaagtcttgggtaaaaactggcctaaaattgctggggatttcaggaaagtaaacatcaccttccggctcgatgtctattgtagatatatgtagtgtatctacttgatcgggggatctgctgcctcgcgcgtttcggtgatgacggtgaaaacctctgacacatgcagctcccggagacggtcacagcttgtctgtaagcggatgccgggagcagacaagcccgtcagggcgcgtcagcgggtgttggcgggtgtcggggcgcagccatgacccagtcacgtagcgatagcggagtgtatactggcttaactatgcggcatcagagcagattgtactgagagtgcaccatatgcggtgtgaaataccgcacagatgcgtaaggagaaaataccgcatcaggcgctcttccgcttcctcgctcactgactcgctgcgctcggtcgttcggctgcggcgagcggtatcagctcactcaaaggcggtaatacggttatccacagaatcaggggataacgcaggaaagaacatgtgagcaaaaggccagcaaaaggccaggaaccgtaaaaaggccgcgttgctggcgtttttccataggctccgcccccctgacgagcatcacaaaaatcgacgctcaagtcagaggtggcgaaacccgacaggactataaagataccaggcgtttccccctggaagctccctcgtgcgctctcctgttccgaccctgccgcttaccggatacctgtccgcctttctcccttcgggaagcgtggcgctttctcatagctcacgctgtaggtatctcagttcggtgtaggtcgttcgctccaagctgggctgtgtgcacgaaccccccgttcagcccgaccgctgcgccttatccggtaactatcgtcttgagtccaacccggtaagacacgacttatcgccactggcagcagccactggtaacaggattagcagagcgaggtatgtaggcggtgctacagagttcttgaagtggtggcctaactacggctacactagaaggacagtatttggtatctgcgctctgctgaagccagttaccttcggaaaaagagttggtagctcttgatccggcaaacaaaccaccgctggtagcggtggtttttttgtttgcaagcagcagattacgcgcagaaaaaaaggatctcaagaagatcctttgatcttttctacggggtctgacgctcagtggaacgaaaactcacgttaagggattttggtcatgagattatcaaaaaggatcttcacctagatccttttaaattaaaaatgaagttttaaatcaatctaaagtatatatgagtaaacttggtctgacagttaccaatgcttaatcagtgaggcacctatctcagcgatctgtctatttcgttcatccatagttgcctgactccccgtcgtgtagataactacgatacgggagggcttaccatctggccccagtgctgcaatgataccgcgagacccacgctcaccggctccagatttatcagcaataaaccagccagccggaagggccgagcgcagaagtggtcctgcaactttatccgcctccatccagtctattaattgttgccgggaagctagagtaagtagttcgccagttaatagtttgcgcaacgttgttgccattgctgcagggggggggggggggggggacttccattgttcattccacggacaaaaacagagaaaggaaacgacagaggccaaaaagcctcgctttcagcacctgtcgtttcctttcttttcagagggtattttaaataaaaacattaagttatgacgaagaagaacggaaacgccttaaaccggaaaattttcataaatagcgaaaacccgcgaggtcgccgccccgtaacctgtcggatcaccggaaaggacccgtaaagtgataatgattatcatctacatatcacaacgtgcgtggaggccatcaaaccacgtcaaataatcaattatgacgcaggtatcgtattaattgatctgcatcaacttaacgtaaaaacaacttcagacaatacaaatcagcgacactgaatacggggcaacctcatgtcccccccccccccccccctgcaggcatcgtggtgtcacgctcgtcgtttggtatggcttcattcagctccggttcccaacgatcaaggcgagttacatgatcccccatgttgtgcaaaaaagcggttagctccttcggtcctccgatcgttgtcagaagtaagttggccgcagtgttatcactcatggttatggcagcactgcataattctcttactgtcatgccatccgtaagatgcttttctgtgactggtgagtactcaaccaagtcattctgagaatagtgtatgcggcgaccgagttgctcttgcccggcgtcaacacgggataataccgcgccacatagcagaactttaaaagtgctcatcattggaaaacgttcttcggggcgaaaactctcaaggatcttaccgctgttgagatccagttcgatgtaacccactcgtgcacccaactgatcttcagcatcttttactttcaccagcgtttctgggtgagcaaaaacaggaaggcaaaatgccgcaaaaaagggaataagggcgacacggaaatgttgaatactcatactcttcctttttcaatattattgaagcatttatcagggttattgtctcatgagcggatacatatttgaatgtatttagaaaaataaacaaataggggttccgcgcacatttccccgaaaagtgccacctgacgtctaagaaaccattattatcatgacattaacctataaaaataggcgtatcacgaggccctttcgtcttcaagaattcggagcttttgccattctcaccggattcagtcgtcactcatggtgatttctcacttgataaccttatttttgacgaggggaaattaataggttgtattgatgttggacgagtcggaatcgcagaccgataccaggatcttgccatcctatggaactgcctcggtgagttttctccttcattacagaaacggctttttcaaaaatatggtattgataatcctgatatgaataaattgcagtttcatttgatgctcgatgagtttttctaatcagaattggttaattggttgtaacactggcagagcattacgctgacttgacgggacggcggctttgttgaataaatcgaacttttgctgagttgaaggatcagatcacgcatcttcccgacaacgcagaccgttccgtggcaaagcaaaagttcaaaatcaccaactggtccacctacaacaaagctctcatcaaccgtggctccctcactttctggctggatgatggggcgattcaggcctggtatgagtcagcaacaccttcttcacgaggcagacctcagcgccagaaggccgccagagaggccgagcgcggccgtgaggcttggacgctagggcagggcatgaaaaagcccgtagcgggctgctacgggcgtctgacgcggtggaaagggggaggggatgttgtctacatggctctgctgtagtgagtgggttgcgctccggcagcggtcctgatcaatcgtcaccctttctcggtccttcaacgttcctgacaacgagcctccttttcgccaatccatcgacaatcaccgcgagtccctgctcgaacgctgcgtccggaccggcttcgtcgaaggcgtctatcgcggcccgcaacagcggcgagagcggagcctgttcaacggtgccgccgcgctcgccggcatcgctgtcgccggcctgctcctcaagcacggccccaacagtgaagtagctgattgtcatcagcgcattgacggcgtccccggccgaaaaacccgcctcgcagaggaagcgaagctgcgcgtcggccgtttccatctgcggtgcgcccggtcgcgtgccggcatggatgcgcgcgccatcgcggtaggcgagcagcgcctgcctgaagctgcgggcattcccgatcagaaatgagcgccagtcgtcgtcggctctcggcaccgaatgcgtatgattctccgccagcatggcttcggccagtgcgtcgagcagcgcccgcttgttcctgaagtgccagtaaagcgccggctgctgaacccccaaccgttccgccagtttgcgtgtcgtcagaccgtctacgccgacctcgttcaacaggtccagggcggcacggatcactgtattcggctgcaactttgtcatgcttgacactttatcactgataaacataatatgtccaccaacttatcagtgataaagaatccgcgcgttcaatcggaccagcggaggctggtccggaggccagacgtgaaacccaacatacccctgatcgtaattctgagcactgtcgcgctcgacgctgtcggcatcggcctgattatgccggtgctgccgggcctcctgcgcgatctggttcactcgaacgacgtcaccgcccactatggcattctgctggcgctgtatgcgttggtgcaatttgcctgcgcacctgtgctgggcgcgctgtcggatcgtttcgggcggcggccaatcttgctcgtctcgctggccggcgccactgtcgactacgccatcatggcgacagcgcctttcctttgggttctctatatcgggcggatcgtggccggcatcaccggggcgactggggcggtagccggcgcttatattgccgatatcactgatggcgatgagcgcgcgcggcacttcggcttcatgagcgcctgtttcgggttcgggatggtcgcgggacctgtgctcggtgggctgatgggcggtttctccccccacgctccgttcttcgccgcggcagccttgaacggcctcaatttcctgacgggctgtttccttttgccggagtcgcacaaaggcgaacgccggccgttacgccgggaggctctcaacccgctcgcttcgttccggtgggcccggggcatgaccgtcgtcgccgccctgatggcggtcttcttcatcatgcaacttgtcggacaggtgccggccgcgctttgggtcattttcggcgaggatcgctttcactgggacgcgaccacgatcggcatttcgcttgccgcatttggcattctgcattcactcgcccaggcaatgatcaccggccctgtagccgcccggctcggcgaaaggcgggcactcatgctcggaatgattgccgacggcacaggctacatcctgcttgccttcgcgacacggggatggatggcgttcccgatcatggtcctgcttgcttcgggtggcatcggaatgccggcgctgcaagcaatgttgtccaggcaggtggatgaggaacgtcaggggcagctgcaaggctcactggcggcgctcaccagcctgacctcgatcgtcggacccctcctcttcacggcgatctatgcggcttctataacaacgtggaacgggtgggcatggattgcaggcgctgccctctacttgctctgcctgccggcgctgcgtcgcgggctttggagcggcgcagggcaacgagccgatcgctgatcgtggaaacgataggcctatgccatgcgggtcaaggcgacttccggcaagctatacgcgccctaggagtgcggttggaacgttggcccagccagatactcccgatcacgagcaggacgccgatgatttgaagcgcactcagcgtctgatccaagaacaaccatcctagcaacacggcggtccccgggctgagaaagcccagtaaggaaacaactgtaggttcgagtcgcgagatcccccggaaccaaaggaagtaggttaaacccgctccgatcaggccgagccacgccaggccgagaacattggttcctgtaggcatcgggattggcggatcaaacactaaagctactggaacgagcagaagtcctccggccgccagttgccaggcggtaaaggtgagcagaggcacgggaggttgccacttgcgggtcagcacggttccgaacgccatggaaaccgcccccgccaggcccgctgcgacgccgacaggatctagcgctgcgtttggtgtcaacaccaacagcgccacgcccgcagttccgcaaatagcccccaggaccgccatcaatcgtatcgggctacctagcagagcggcagagatgaacacgaccatcagcggctgcacagcgcctaccgtcgccgcgaccccgcccggcaggcggtagaccgaaataaacaacaagctccagaatagcgaaatattaagtgcgccgaggatgaagatgcgcatccaccagattcccgttggaatctgtcggacgatcatcacgagcaataaacccgccggcaacgcccgcagcagcataccggcgacccctcggcctcgctgttcgggctccacgaaaacgccggacagatgcgccttgtgagcgtccttggggccgtcctcctgtttgaagaccgacagcccaatgatctcgccgtcgatgtaggcgccgaatgccacggcatctcgcaaccgttcagcgaacgcctccatgggctttttctcctcgtgctcgtaaacggacccgaacatctctggagctttcttcagggccgacaatcggatctcgcggaaatcctgcacgtcggccgctccaagccgtcgaatctgagccttaatcacaattgtcaattttaatcctctgtttatcggcagttcgtagagcgcgccgtgcgtcccgagcgatactgagcgaagcaagtgcgtcgagcagtgcccgcttgttcctgaaatgccagtaaagcgctggctgctgaacccccagccggaactgaccccacaaggccctagcgtttgcaatgcaccaggtcatcattgacccaggcgtgttccaccaggccgctgcctcgcaactcttcgcaggcttcgccgacctgctcgcgccacttcttcacgcgggtggaatccgatccgcacatgaggcggaaggtttccagcttgagcgggtacggctcccggtgcgagctgaaatagtcgaacatccgtcgggccgtcggcgacagcttgcggtacttctcccatatgaatttcgtgtagtggtcgccagcaaacagcacgacgatttcctcgtcgatcaggacctggcaacgggacgttttcttgccacggtccaggacgcggaagcggtgcagcagcgacaccgattccaggtgcccaacgcggtcggacgtgaagcccatcgccgtcgcctgtaggcgcgacaggcattcctcggccttcgtgtaataccggccattgatcgaccagcccaggtcctggcaaagctcgtagaacgtgaaggtgatcggctcgccgataggggtgcgcttcgcgtactccaacacctgctgccacaccagttcgtcatcgtcggcccgcagctcgacgccggtgtaggtgatcttcacgtccttgttgacgtggaaaatgaccttgttttgcagcgcctcgcgcgggattttcttgttgcgcgtggtgaacagggcagagcgggccgtgtcgtttggcatcgctcgcatcgtgtccggccacggcgcaatatcgaacaaggaaagctgcatttccttgatctgctgcttcgtgtgtttcagcaacgcggcctgcttggcctcgctgacctgttttgccaggtcctcgccggcggtttttcgcttcttggtcgtcatagttcctcgcgtgtcgatggtcatcgacttcgccaaacctgccgcctcctgttcgagacgacgcgaacgctccacggcggccgatggcgcgggcagggcagggggagccagttgcacgctgtcgcgctcgatcttggccgtagcttgctggaccatcgagccgacggactggaaggtttcgcggggcgcacgcatgacggtgcggcttgcgatggtttcggcatcctcggcggaaaaccccgcgtcgatcagttcttgcctgtatgccttccggtcaaacgtccgattcattcaccctccttgcgggattgccccgactcacgccggggcaatgtgcccttattcctgatttgacccgcctggtgccttggtgtccagataatccaccttatcggcaatgaagtcggtcccgtagaccgtctggccgtccttctcgtacttggtattccgaatcttgccctgcacgaataccagcgaccccttgcccaaatacttgccgtgggcctcggcctgagagccaaaacacttgatgcggaagaagtcggtgcgctcctgcttgtcgccggcatcgttgcgccactcttcattaaccgctatatcgaaaattgcttgcggcttgttagaattgccatgacgtacctcggtgtcacgggtaagattaccgataaactggaactgattatggctcatatcgaaagtctccttgagaaaggagactctagtttagctaaacattggttccgctgtcaagaactttagcggctaaaattttgcgggccgcgaccaaaggtgcgaggggcggcttccgctgtgtacaaccagatatttttcaccaacatccttcgtctgctcgatgagcggggcatgacgaaacatgagctgtcggagagggcaggggtttcaatttcgtttttatcagacttaaccaacggtaaggccaacccctcgttgaaggtgatggaggccattgccgacgccctggaaactcccctacctcttctcctggagtccaccgaccttgaccgcgaggcactcgcggagattgcgggtcatcctttcaagagcagcgtgccgcccggatacgaacgcatcagtgtggttttgccgtcacataaggcgtttatcgtaaagaaatggggcgacgacacccgaaaaaagctgcgtggaaggctctgacgccaagggttagggcttgcacttccttctttagccgctaaaacggccccttctctgcgggccgtcggctcgcgcatcatatcgacatcctcaacggaagccgtgccgcgaatggcatcgggcgggtgcgctttgacagttgttttctatcagaacccctacgtcgtgcggttcgattagctgtttgtcttgcaggctaaacactttcggtatatcgtttgcctgtgcgataatgttgctaatgatttgttgcgtaggggttactgaaaagtgagcgggaaagaagagtttcagaccatcaaggagcgggccaagcgcaagctggaacgcgacatgggtgcggacctgttggccgcgctcaacgacccgaaaaccgttgaagtcatgctcaacgcggacggcaaggtgtggcacgaacgccttggcgagccgatgcggtacatctgcgacatgcggcccagccagtcgcaggcgattatagaaacggtggccggattccacggcaaagaggtcacgcggcattcgcccatcctggaaggcgagttccccttggatggcagccgctttgccggccaattgccgccggtcgtggccgcgccaacctttgcgatccgcaagcgcgcggtcgccatcttcacgctggaacagtacgtcgaggcgggcatcatgacccgcgagcaatacgaggtcattaaaagcgccgtcgcggcgcatcgaaacatcctcgtcattggcggtactggctcgggcaagaccacgctcgtcaacgcgatcatcaatgaaatggtcgccttcaacccgtctgagcgcgtcgtcatcatcgaggacaccggcgaaatccagtgcgccgcagagaacgccgtccaataccacaccagcatcgacgtctcgatgacgctgctgctcaagacaacgctgcgtatgcgccccgaccgcatcctggtcggtgaggtacgtggccccgaagcccttgatctgttgatggcctggaacaccgggcatgaaggaggtgccgccaccctgcacgcaaacaaccccaaagcgggcctgagccggctcgccatgcttatcagcatgcacccggattcaccgaaacccattgagccgctgattggcgaggcggttcatgtggtcgtccatatcgccaggacccctagcggccgtcgagtgcaagaaattctcgaagttcttggttacgagaacggccagtacatcaccaaaaccctgtaaggagtatttccaatgacaacggctgttccgttccgtctgaccatgaatcgcggcattttgttctaccttgccgtgttcttcgttctcgctctcgcgttatccgcgcatccggcgatggcctcggaaggcaccggcggcagcttgccatatgagagctggctgacgaacctgcgcaactccgtaaccggcccggtggccttcgcgctgtccatcatcggcatcgtcgtcgccggcggcgtgctgatcttcggcggcgaactcaacgccttcttccgaaccctgatcttcctggttctggtgatggcgctgctggtcggcgcgcagaacgtgatgagcaccttcttcggtcgtggtgccgaaatcgcggccctcggcaacggggcgctgcaccaggtgcaagtcgcggcggcggatgccgtgcgtgcggtagcggctggacggctcgcctaatcatggctctgcgcacgatccccatccgtcgcgcaggcaaccgagaaaacctgttcatgggtggtgatcgtgaactggtgatgttctcgggcctgatggcgtttgcgctgattttcagcgcccaagagctgcgggccaccgtggtcggtctgatcctgtggttcggggcgctctatgcgttccgaatcatggcgaaggccgatccgaagatgcggttcgtgtacctgcgtcaccgccggtacaagccgtattacccggcccgctcgaccccgttccgcgagaacaccaatagccaagggaagcaataccgatgatccaagcaattgcgattgcaatcgcgggcctcggcgcgcttctgttgttcatcctctttgcccgcatccgcgcggtcgatgccgaactgaaactgaaaaagcatcgttccaaggacgccggcctggccgatctgctcaactacgccgctgtcgtcgatgacggcgtaatcgtgggcaagaacggcagctttatggctgcctggctgtacaagggcgatgacaacgcaagcagcaccgaccagcagcgcgaagtagtgtccgcccgcatcaaccaggccctcgcgggcctgggaagtgggtggatgatccatgtggacgccgtgcggcgtcctgctccgaactacgcggagcggggcctgtcggcgttccctgaccgtctgacggcagcgattgaagaagagcgctcggtcttgccttgctcgtcggtgatgtacttcaccagctccgcgaagtcgctcttcttgatggagcgcatggggacgtgcttggcaatcacgcgcaccccccggccgttttagcggctaaaaaagtcatggctctgccctcgggcggaccacgcccatcatgaccttgccaagctcgtcctgcttctcttcgatcttcgccagcagggcgaggatcgtggcatcaccgaaccgcgccgtgcgcgggtcgtcggtgagccagagtttcagcaggccgcccaggcggcccaggtcgccattgatgcgggccagctcgcggacgtgctcatagtccacgacgcccgtgattttgtagccctggccgacggccagcaggtaggccgacaggctcatgccggccgccgccgccttttcctcaatcgctcttcgttcgtctggaaggcagtacaccttgataggtgggctgcccttcctggttggcttggtttcatcagccatccgcttgccctcatctgttacgccggcggtagccggccagcctcgcagagcaggattcccgttgagcaccgccaggtgcgaataagggacagtgaagaaggaacacccgctcgcgggtgggcctacttcacctatcctgcccggctgacgccgttggatacaccaaggaaagtctacacgaaccctttggcaaaatcctgtatatcgtgcgaaaaaggatggatataccgaaaaaatcgctataatgaccccgaagcagggttatgcagcggaaaagcgctgcttccctgctgttttgtggaatatctaccgactggaaacaggcaaatgcaggaaattactgaactgaggggacaggcgagagacgatgccaaagagctacaccgacgagctggccgagtgggttgaatcccgcgcggccaagaagcgccggcgtgatgaggctgcggttgcgttcctggcggtgagggcggatgtcgaggcggcgttagcgtccggctatgcgctcgtcaccatttgggagcacatgcgggaaacggggaaggtcaagttctcctacgagacgttccgctcgcacgccaggcggcacatcaaggccaagcccgccgatgtgcccgcaccgcaggccaaggctgcggaacccgcgccggcacccaagacgccggagccacggcggccgaagcaggggggcaaggctgaaaagccggcccccgctgcggccccgaccggcttcaccttcaacccaacaccggacaaaaaggatctactgtaatggcgaaaattcacatggttttgcagggcaagggcggggtcggcaagtcggccatcgccgcgatcattgcgcagtacaagatggacaaggggcagacacccttgtgcatcgacaccgacccggtgaacgcgacgttcgagggctacaaggccctgaacgtccgccggctgaacatcatggccggcgacgaaattaactcgcgcaacttcgacaccctggtcgagctgattgcgccgaccaaggatgacgtggtgatcgacaacggtgccagctcgttcgtgcctctgtcgcattacctcatcagcaaccaggtgccggctctgctgcaagaaatggggcatgagctggtcatccataccgtcgtcaccggcggccaggctctcctggacacggtgagcggcttcgcccagctcgccagccagttcccggccgaagcgcttttcgtggtctggctgaacccgtattgggggcctatcgagcatgagggcaagagctttgagcagatgaaggcgtacacggccaacaaggcccgcgtgtcgtccatcatccagattccggccctcaaggaagaaacctacggccgcgatttcagcgacatgctgcaagagcggctgacgttcgaccaggcgctggccgatgaatcgctcacgatcatgacgcggcaacgcctcaagatcgtgcggcgcggcctgtttgaacagctcgacgcggcggccgtgctatgagcgaccagattgaagagctgatccgggagattgcggccaagcacggcatcgccgtcggccgcgacgacccggtgctgatcctgcataccatcaacgcccggctcatggccgacagtgcggccaagcaagaggaaatccttgccgcgttcaaggaagagctggaagggatcgcccatcgttggggcgaggacgccaaggccaaagcggagcggatgctgaacgcggccctggcggccagcaaggacgcaatggcgaaggtaatgaaggacagcgccgcgcaggcggccgaagcgatccgcagggaaatcgacgacggccttggccgccagctcgcggccaaggtcgcggacgcgcggcgcgtggcgatgatgaacatgatcgccggcggcatggtgttgttcgcggccgccctggtggtgtgggcctcgttatgaatcgcagaggcgcagatgaaaaagcccggcgttgccgggctttgtttttgcgttagctgggcttgtttgacaggcccaagctctgactgcgcccgcgctcgcgctcctgggcctgtttcttctcctgctcctgcttgcgcatcagggcctggtgccgtcgggctgcttcacgcatcgaatcccagtcgccggccagctcgggatgctccgcgcgcatcttgcgcgtcgccagttcctcgatcttgggcgcgtgaatgcccatgccttccttgatttcgcgcaccatgtccagccgcgtgtgcagggtctgcaagcgggcttgctgttgggcctgctgctgctgccaggcggcctttgtacgcggcagggacagcaagccgggggcattggactgtagctgctgcaaacgcgcctgctgacggtctacgagctgttctaggcggtcctcgatgcgctccacctggtcatgctttgcctgcacgtagagcgcaagggtctgctggtaggtctgctcgatgggcgcggattctaagagggcctgctgttccgtctcggcctcctgggccgcctgtagcaaatcctcgccgctgttgccgctggactgctttactgccggggactgctgttgccctgctcgcgccgtcgtcgcagttcggcttgcccccactcgattgactgcttcatttcgagccgcagcgatgcgatctcggattgcgtcaacggacggggcagcgcggaggtgtccggcttctccttgggtgagtcggtcgatgccatagccaaaggtttccttccaaaatgcgtccattgctggaccgtgtttctcattgatgcccgcaagcatcttcggcttgaccgccaggtcaagcgcgccttcatgggcggtcatgacggacgccgccatgaccttgccgccgttgttctcgatgtagccgcgtaatgaggcaatggtgccgcccatcgtcagcgtgtcatcgacaacgatgtacttctggccggggatcacctccccctcgaaagtcgggttgaacgccaggcgatgatctgaaccggctccggttcgggcgaccttctcccgctgcacaatgtccgtttcgacctcaaggccaaggcggtcggccagaacgaccgccatcatggccggaatcttgttgttccccgccgcctcgacggcgaggactggaacgatgcggggcttgtcgtcgccgatcagcgtcttgagctgggcaacagtgtcgtccgaaatcaggcgctcgaccaaattaagcgccgcttccgcgtcgccctgcttcgcagcctggtattcaggctcgttggtcaaagaaccaaggtcgccgttgcgaaccaccttcgggaagtctccccacggtgcgcgctcggctctgctgtagctgctcaagacgcctccctttttagccgctaaaactctaacgagtgcgcccgcgactcaacttgacgctttcggcacttacctgtgccttgccacttgcgtcataggtgatgcttttcgcactcccgatttcaggtactttatcgaaatctgaccgggcgtgcattacaaagttcttccccacctgttggtaaatgctgccgctatctgcgtggacgatgctgccgtcgtggcgctgcgacttatcggccttttgggccatatagatgttgtaaatgccaggtttcagggccccggctttatctaccttctggttcgtccatgcgccttggttctcggtctggacaattctttgcccattcatgaccaggaggcggtgtttcattgggtgactcctgacggttgcctctggtgttaaacgtgtcctggtcgcttgccggctaaaaaaaagccgacctcggcagttcgaggccggctttccctagagccgggcgcgtcaaggttgttccatctattttagtgaactgcgttcgatttatcagttactttcctcccgctttgtgtttcctcccactcgtttccgcgtctagccgacccctcaacatagcggcctcttcttgggctgcctttgcctcttgccgcgcttcgtcacgctcggcttgcaccgtcgtaaagcgctcggcctgcctggccgcctcttgcgccgccaacttcctttgctcctggtgggcctcggcgtcggcctgcgccttcgctttcaccgctgccaactccgtgcgcaaactctccgcttcgcgcctggtggcgtcgcgctcgccgcgaagcgcctgcatttcctggttggccgcgtccagggtcttgcggctctcttctttgaatgcgcgggcgtcctggtgagcgtagtccagctcggcgcgcagctcctgcgctcgacgctccacctcgtcggcccgctgcgtcgccagcgcggcccgctgctcggctcctgccagggcggtgcgtgcttcggccagggcttgccgctggcgtgcggccagctcggccgcctcggcggcctgctgctctagcaatgtaacgcgcgcctgggcttcttccagctcgcgggcctgcgcctcgaaggcgtcggccagctccccgcgcacggcttccaactcgttgcgctcacgatcccagccggcttgcgctgcctgcaacgattcattggcaagggcctgggcggcttgccagagggcggccacggcctggttgccggcctgctgcaccgcgtccggcacctggactgccagcggggcggcctgcgccgtgcgctggcgtcgccattcgcgcatgccggcgctggcgtcgttcatgttgacgcgggcggccttacgcactgcatccacggtcgggaagttctcccggtcgccttgctcgaacagctcgtccgcagccgcaaaaatgcggtcgcgcgtctctttgttcagttccatgttggctccggtaattggtaagaataataatactcttacctaccttatcagcgcaagagtttagctgaacagttctcgacttaacggcaggttttttagcggctgaagggcaggcaaaaaaagccccgcacggtcggcgggggcaaagggtcagcgggaaggggattagcgggcgtcgggcttcttcatgcgtcggggccgcgcttcttgggatggagcacgacgaagcgcgcacgcgcatcgtcctcggccctatcggcccgcgtcgcggtcaggaacttgtcgcgcgctaggtcctccctggtgggcaccaggggcatgaactcggcctgctcgatgtaggtccactccatgaccgcatcgcagtcgaggccgcgttccttcaccgtctcttgcaggtcgcggtacgcccgctcgttgagcggctggtaacgggccaattggtcgtaaatggctgtcggccatgagcggcctttcctgttgagccagcagccgacgacgaagccggcaatgcaggcccctggcacaaccaggccgacgccgggggcaggggatggcagcagctcgccaaccaggaaccccgccgcgatgatgccgatgccggtcaaccagcccttgaaactatccggccccgaaacacccctgcgcattgcctggatgctgcgccggatagcttgcaacatcaggagccgtttcttttgttcgtcagtcatggtccgccctcaccagttgttcgtatcggtgtcggacgaactgaaatcgcaagagctgccggtatcggtccagccgctgtccgtgtcgctgctgccgaagcacggcgaggggtccgcgaacgccgcagacggcgtatccggccgcagcgcatcgcccagcatggccccggtcagcgagccgccggccaggtagcccagcatggtgctgttggtcgccccggccaccagggccgacgtgacgaaatcgccgtcattccctctggattgttcgctgctcggcggggcagtgcgccgcgccggcggcgtcgtggatggctcgggttggctggcctgcgacggccggcgaaaggtgcgcagcagctcgttatcgaccggctgcggcgtcggggccgccgccttgcgctgcggtcggtgttccttcttcggctcgcgcagcttgaacagcatgatcgcggaaaccagcagcaacgccgcgcctacgcctcccgcgatgtagaacagcatcggattcattcttcggtcctccttgtagcggaaccgttgtctgtgcggcgcgggtggcccgcgccgctgtctttggggatcagccctcgatgagcgcgaccagtttcacgtcggcaaggttcgcctcgaactcctggccgtcgtcctcgtacttcaaccaggcatagccttccgccggcggccgacggttgaggataaggcgggcagggcgctcgtcgtgctcgacctggacgatggcctttttcagcttgtccgggtccggctccttcgcgcccttttccttggcgtccttaccgtcctggtcgccgtcctcgccgtcctggccgtcgccggcctccgcgtcacgctcggcatcagtctggccgttgaaggcatcgacggtgttgggatcgcggcccttctcgtccaggaactcgcgcagcagcttgaccgtgccgcgcgtgatttcctgggtgtcgtcgtcaagccacgcctcgacttcctccgggcgcttcttgaaggccgtcaccagctcgttcaccacggtcacgtcgcgcacgcggccggtgttgaacgcatcggcgatcttctccggcaggtccagcagcgtgacgtgctgggtgatgaacgccggcgacttgccgatttccttggcgatatcgcctttcttcttgcccttcgccagctcgcggccaatgaagtcggcaatttcgcgcggggtcagctcgttgcgttgcaggttctcgataacctggtcggcttcgttgtagtcgttgtcgatgaacgccgggatggacttcttgccggcccacttcgagccacggtagcggcgggcgccgtgattgatgatatagcggcccggctgctcctggttctcgcgcaccgaaatgggtgacttcaccccgcgctctttgatcgtggcaccgatttccgcgatgctctccggggaaaagccggggttgtcggccgtccgcggctgatgcggatcttcgtcgatcaggtccaggtccagctcgatagggccggaaccgccctgagacgccgcaggagcgtccaggaggctcgacaggtcgccgatgctatccaaccccaggccggacggctgcgccgcgcctgcggcttcctgagcggccgcagcggtgtttttcttggtggtcttggcttgagccgcagtcattgggaaatctccatcttcgtgaacacgtaatcagccagggcgcgaacctctttcgatgccttgcgcgcggccgttttcttgatcttccagaccggcacaccggatgcgagggcatcggcgatgctgctgcgcaggccaacggtggccggaatcatcatcttggggtacgcggccagcagctcggcttggtggcgcgcgtggcgcggattccgcgcatcgaccttgctgggcaccatgccaaggaattgcagcttggcgttcttctggcgcacgttcgcaatggtcgtgaccatcttcttgatgccctggatgctgtacgcctcaagctcgatgggggacagcacatagtcggccgcgaagagggcggccgccaggccgacgccaagggtcggggccgtgtcgatcaggcacacgtcgaagccttggttcgccagggccttgatgttcgccccgaacagctcgcgggcgtcgtccagcgacagccgttcggcgttcgccagtaccgggttggactcgatgagggcgaggcgcgcggcctggccgtcgccggctgcgggtgcggtttcggtccagccgccggcagggacagcgccgaacagcttgcttgcatgcaggccggtagcaaagtccttgagcgtgtaggacgcattgccctgggggtccaggtcgatcacggcaacccgcaagccgcgctcgaaaaagtcgaaggcaagatgcacaagggtcgaagtcttgccgacgccgcctttctggttggccgtgaccaaagttttcatcgtttggtttcctgttttttcttggcgtccgcttcccacttccggacgatgtacgcctgatgttccggcagaaccgccgttacccgcgcgtacccctcgggcaagttcttgtcctcgaacgcggcccacacgcgatgcaccgcttgcgacactgcgcccctggtcagtcccagcgacgttgcgaacgtcgcctgtggcttcccatcgactaagacgccccgcgctatctcgatggtctgctgccccacttccagcccctggatcgcctcctggaactggctttcggtaagccgtttcttcatggataacacccataatttgctccgcgccttggttgaacatagcggtgacagccgccagcacatgagagaagtttagctaaacatttctcgcacgtcaacacctttagccgctaaaactcgtccttggcgtaacaaaacaaaagcccggaaaccgggctttcgtctcttgccgcttatggctctgcacccggctccatcaccaacaggtcgcgcacgcgcttcactcggttgcggatcgacactgccagcccaacaaagccggttgccgccgccgccaggatcgcgccgatgatgccggccacaccggccatcgcccaccaggtcgccgccttccggttccattcctgctggtactgcttcgcaatgctggacctcggctcaccataggctgaccgctcgatggcgtatgccgcttctccccttggcgtaaaacccagcgccgcaggcggcattgccatgctgcccgccgctttcccgaccacgacgcgcgcaccaggcttgcggtccagaccttcggccacggcgagctgcgcaaggacataatcagccgccgacttggctccacgcgcctcgatcagctcttgcactcgcgcgaaatccttggcctccacggccgccatgaatcgcgcacgcggcgaaggctccgcagggccggcgtcgtgatcgccgccgagaatgcccttcaccaagttcgacgacacgaaaatcatgctgacggctatcaccatcatgcagacggatcgcacgaacccgctgaattgaacacgagcacggcacccgcgaccactatgccaagaatgcccaaggtaaaaattgccggccccgccatgaagtccgtgaatgccccgacggccgaagtgaagggcaggccgccacccaggccgccgccctcactgcccggcacctggtcgctgaatgtcgatgccagcacctgcggcacgtcaatgcttccgggcgtcgcgctcgggctgatcgcccatcccgttactgccccgatcccggcaatggcaaggactgccagcgctgccatttttggggtgaggccgttcgcggccgaggggcgcagcccctggggggatgggaggcccgcgttagcgggccgggagggttcgagaagggggggcaccccccttcggcgtgcgcggtcacgcgcacagggcgcagccctggttaaaaacaaggtttataaatattggtttaaaagcaggttaaaagacaggttagcggtggccgaaaaacgggcggaaacccttgcaaatgctggattttctgcctgtggacagcccctcaaatgtcaataggtgcgcccctcatctgtcagcactctgcccctcaagtgtcaaggatcgcgcccctcatctgtcagtagtcgcgcccctcaagtgtcaataccgcagggcacttatccccaggcttgtccacatcatctgtgggaaactcgcgtaaaatcaggcgttttcgccgatttgcgaggctggccagctccacgtcgccggccgaaatcgagcctgcccctcatctgtcaacgccgcgccgggtgagtcggcccctcaagtgtcaacgtccgcccctcatctgtcagtgagggccaagttttccgcgaggtatccacaacgccggcggccgcggtgtctcgcacacggcttcgacggcgtttctggcgcgtttgcagggccatagacggccgccagcccagcggcgagggcaaccagcccggtgagcgtcggaaaggcgctggaagccccgtagcgacgcggagaggggcgagacaagccaagggcgcaggctcgatgcgcagcacgacatagccggttctcgcaaggacgagaatttccctgcggtgcccctcaagtgtcaatgaaagtttccaacgcgagccattcgcgagagccttgagtccacgctagatgagagctttgttgtaggtggaccagttggtgattttgaacttttgctttgccacggaacggtctgcgttgtcgggaagatgcgtgatctgatccttcaactcagcaaaagttcgatttattcaacaaagccacgttgtgtctcaaaatctctgatgttacattgcacaagataaaaatatatcatcatgaacaataaaactgtctgcttacataaacagtaatacaaggggtgttatgagccatattcaacgggaaacgtcttgctcgactctagagctcgttcctcgaggcctcgaggcctcgaggaacggtacctgcggggaagcttacaataatgtgtgttgttaagtcttgttgcctgtcatcgtctgactgactttcgtcataaatcccggcctccgtaacccagctttgggcaagctcacggatttgatccggcggaacgggaatatcgagatgccgggctgaacgctgcagttccagctttccctttcgggacaggtactccagctgattgattatctgctgaagggtcttggttccacctcctggcacaatgcgaatgattacttgagcgcgatcgggcatccaattttctcccgtcaggtgcgtggtcaagtgctacaaggcacctttcagtaacgagcgaccgtcgatccgtcgccgggatacggacaaaatggagcgcagtagtccatcgagggcggcgaaagcctcgccaaaagcaatacgttcatctcgcacagcctccagatccgatcgagggtcttcggcgtaggcagatagaagcatggatacattgcttgagagtattccgatggactgaagtatggcttccatcttttctcgtgtgtctgcatctatttcgagaaagcccccgatgcggcgcaccgcaacgcgaattgccatactatccgaaagtcccagcaggcgcgcttgataggaaaaggtttcatactcggccgatcgcagacgggcactcacgaccttgaacccttcaactttcagggatcgatgctggttgatggtagtctcactcgacgtggctctggtgtgttttgacatagcttcctccaaagaaagcggaaggtctggatactccagcacgaaatgtgcccgggtagacggatggaagtctagccctgctcaatatgaaatcaacagtacatttacagtcaatactgaatatacttgctacatttgcaattgtcttataacgaatgtgaaataaaaatagtgtaacaacgcttttactcatcgataatcacaaaaacatttatacgaacaaaaatacaaatgcactccggtttcacaggataggcgggatcagaatatgcaacttttgacgttttgttctttcaaagggggtgctggcaaaaccaccgcactcatgggcctttgcgctgctttggcaaatgacggtaaacgagtggccctctttgatgccgacgaaaaccggcctctgacgcgatggagagaaaacgccttacaaagcagtactgggatcctcgctgtgaagtctattccgccgacgaaatgccccttcttgaagcagcctatgaaaatgccgagctcgaaggatttgattatgcgttggccgatacgcgtggcggctcgagcgagctcaacaacacaatcatcgctagctcaaacctgcttctgatccccaccatgctaacgccgctcgacatcgatgaggcactatctacctaccgctacgtcatcgagctgctgttgagtgaaaatttggcaattcctacagctgttttgcgccaacgcgtcccggtcggccgattgacaacatcgcaacgcaggatgtcagagacgctagagagccttccagttgtaccgtctcccatgcatgaaagagatgcatttgccgcgatgaaagaacgcggcatgttgcatcttacattactaaacacgggaactgatccgacgatgcgcctcatagagaggaatcttcggattgcgatggaggaagtcgtggtcatttcgaaactgatcagcaaaatcttggaggcttgaagatggcaattcgcaagcccgcattgtcggtcggcgaagcacggcggcttgctggtgctcgacccgagatccaccatcccaacccgacacttgttccccagaagctggacctccagcacttgcctgaaaaagccgacgagaaagaccagcaacgtgagcctctcgtcgccgatcacatttacagtcccgatcgacaacttaagctaactgtggatgcccttagtccacctccgtccccgaaaaagctccaggtttttctttcagcgcgaccgcccgcgcctcaagtgtcgaaaacatatgacaacctcgttcggcaatacagtccctcgaagtcgctacaaatgattttaaggcgcgcgttggacgatttcgaaagcatgctggcagatggatcatttcgcgtggccccgaaaagttatccgatcccttcaactacagaaaaatccgttctcgttcagacctcacgcatgttcccggttgcgttgctcgaggtcgctcgaagtcattttgatccgttggggttggagaccgctcgagctttcggccacaagctggctaccgccgcgctcgcgtcattctttgctggagagaagccatcgagcaattggtgaagagggacctatcggaacccctcaccaaatattgagtgtaggtttgaggccgctggccgcgtcctcagtcaccttttgagccagataattaagagccaaatgcaattggctcaggctgccatcgtccccccgtgcgaaacctgcacgtccgcgtcaaagaaataaccggcacctcttgctgtttttatcagttgagggcttgacggatccgcctcaagtttgcggcgcagccgcaaaatgagaacatctatactcctgtcgtaaacctcctcgtcgcgtactcgactggcaatgagaagttgctcgcgcgatagaacgtcgcggggtttctctaaaaacgcgaggagaagattgaactcacctgccgtaagtttcacctcaccgccagcttcggacatcaagcgacgttgcctgagattaagtgtccagtcagtaaaacaaaaagaccgtcggtctttggagcggacaacgttggggcgcacgcgcaaggcaacccgaatgcgtgcaagaaactctctcgtactaaacggcttagcgataaaatcacttgctcctagctcgagtgcaacaactttatccgtctcctcaaggcggtcgccactgataattatgattggaatatcagactttgccgccagatttcgaacgatctcaagcccatcttcacgacctaaatttagatcaacaaccacgacatcgaccgtcgcggaagagagtactctagtgaactgggtgctgtcggctaccgcggtcactttgaaggcgtggatcgtaaggtattcgataataagatgccgcatagcgacatcgtcatcgataagaagaacgtgtttcaacggctcacctttcaatctaaaatctgaacccttgttcacagcgcttgagaaattttcacgtgaaggatgtacaatcatctccagctaaatgggcagttcgtcagaattgcggctgaccgcggatgacgaaaatgcgaaccaagtatttcaattttatgacaaaagttctcaatcgttgttacaagtgaaacgcttcgaggttacagctactattgattaaggagatcgcctatggtctcgccccggcgtcgtgcgtccgccgcgagccagatctcgcctacttcataaacgtcctcataggcacggaatggaatgatgacatcgatcgccgtagagagcatgtcaatcagtgtgcgatcttccaagctagcaccttgggcgctacttttgacaagggaaaacagtttcttgaatccttggattggattcgcgccgtgtattgttgaaatcgatcccggatgtcccgagacgacttcactcagataagcccatgctgcatcgtcgcgcatctcgccaagcaatatccggtccggccgcatacgcagacttgcttggagcaagtgctcggcgctcacagcacccagcccagcaccgttcttggagtagagtagtctaacatgattatcgtgtggaatgacgagttcgagcgtatcttctatggtgattagcctttcctggggggggatggcgctgatcaaggtcttgctcattgttgtcttgccgcttccggtagggccacatagcaacatcgtcagtcggctgacgacgcatgcgtgcagaaacgcttccaaatccccgttgtcaaaatgctgaaggatagcttcatcatcctgattttggcgtttccttcgtgtctgccactggttccacctcgaagcatcataacgggaggagacttctttaagaccagaaacacgcgagcttggccgtcgaatggtcaagctgacggtgcccgagggaacggtcggcggcagacagatttgtagtcgttcaccaccaggaagttcagtggcgcagagggggttacgtggtccgacatcctgctttctcagcgcgcccgctaaaatagcgatatcttcaagatcatcataagagacgggcaaaggcatcttggtaaaaatgccggcttggcgcacaaatgcctctccaggtcgattgatcgcaatttcttcagtcttcgggtcatcgagccattccaaaatcggcttcagaagaaagcgtagttgcggatccacttccatttacaatgtatcctatctctaagcggaaatttgaattcattaagagcggcggttcctcccccgcgtggcgccgccagtcaggcggagctggtaaacaccaaagaaatcgaggtcccgtgctacgaaaatggaaacggtgtcaccctgattcttcttcagggttggcggtatgttgatggttgccttaagggctgtctcagttgtctgctcaccgttattttgaaagctgttgaagctcatcccgccacccgagctgccggcgtaggtgctagctgcctggaaggcgccttgaacaacactcaagagcatagctccgctaaaacgctgccagaagtggctgtcgaccgagcccggcaatcctgagcgaccgagttcgtccgcgcttggcgatgttaacgagatcatcgcatggtcaggtgtctcggcgcgatcccacaacacaaaaacgcgcccatctccctgttgcaagccacgctgtatttcgccaacaacggtggtgccacgatcaagaagcacgatattgttcgttgttccacgaatatcctgaggcaagacacactttacatagcctgccaaatttgtgtcgattgcggtttgcaagatgcacggaattattgtcccttgcgttaccataaaatcggggtgcggcaagagcgtggcgctgctgggctgcagctcggtgggtttcatacgtatcgacaaatcgttctcgccggacacttcgccattcggcaaggagttgtcgtcacgcttgccttcttgtcttcggcccgtgtcgccctgaatggcgcgtttgctgaccccttgatcgccgctgctatatgcaaaaatcggtgtttcttccggccgtggctcatgccgctccggttcgcccctcggcggtagaggagcagcaggctgaacagcctcttgaaccgctggaggatccggcggcacctcaatcggagctggatgaaatggcttggtgtttgttgcgatcaaagttgacggcgatgcgttctcattcaccttcttttggcgcccacctagccaaatgaggcttaatgataacgcgagaacgacacctccgacgatcaatttctgagaccccgaaagacgccggcgatgtttgtcggagaccagggatccagatgcatcaacctcatgtgccgcttgctgactatcgttattcatcccttcgcccccttcaggacgcgtttcacatcgggcctcaccgtgcccgtttgcggcctttggccaacgggatcgtaagcggtgttccagatacatagtactgtgtggccatccctcagacgccaacctcgggaaaccgaagaaatctcgacatcgctccctttaactgaatagttggcaacagcttccttgccatcaggattgatggtgtagatggagggtatgcgtacattgcccggaaagtggaataccgtcgtaaatccattgtcgaagacttcgagtggcaacagcgaacgatcgccttgggcgacgtagtgccaattactgtccgccgcaccaagggctgtgacaggctgatccaataaattctcagctttccgttgatattgtgcttccgcgtgtagtctgtccacaacagccttctgttgtgcctcccttcgccgagccgccgcatcgtcggcggggtaggcgaattggacgctgtaatagagatcgggctgctctttatcgaggtgggacagagtcttggaacttatactgaaaacataacggcgcatcccggagtcgcttgcggttagcacgattactggctgaggcgtgaggacctggcttgccttgaaaaatagataatttccccgcggtagggctgctagatctttgctatttgaaacggcaaccgctgtcaccgtttcgttcgtggcgaatgttacgaccaaagtagctccaaccgccgtcgagaggcgcaccacttgatcgggattgtaagccaaataacgcatgcgcggatctagcttgcccgccattggagtgtcttcagcctccgcaccagtcgcagcggcaaataaacatgctaaaatgaaaagtgcttttctgatcatggttcgctgtggcctacgtttgaaacggtatcttccgatgtctgataggaggtgacaaccagacctgccgggttggttagtctcaatctgccgggcaagctggtcaccttttcgtagcgaactgtcgcggtccacgtactcaccacaggcattttgccgtcaacgacgagggtccttttatagcgaatttgctgcgtgcttggagttacatcatttgaagcgatgtgctcgacctccaccctgccgcgtttgccaagaatgacttgaggcgaactgggattgggatagttgaagaattgctggtaatcctggcgcactgttggggcactgaagttcgataccaggtcgtaggcgtactgagcggtgtcggcatcataactctcgcgcaggcgaacgtactcccacaatgaggcgttaacgacggcctcctcttgagttgcaggcaatcgcgagacagacacctcgctgtcaacggtgccgtccggccgtatccatagatatacgggcacaagcctgctcaacggcaccattgtggctatagcgaacgcttgagcaacatttcccaaaatcgcgatagctgcgacagctgcaatgagtttggagagacgtcgcgccgatttcgctcgcgcggtttgaaaggcttctacttccttatagtgctcggcaaggctttcgcgcgccactagcatggcatattcaggccccgtcatagcgtccacccgaattgccgagctgaagatctgacggagtaggctgccatcgccccacattcagcgggaagatcgggcctttgcagctcgctaatgtgtcgtttgtctggcagccgctcaaagcgacaactaggcacagcaggcaatacttcatagaattctccattgaggcgaatttttgcgcgacctagcctcgctcaacctgagcgaagcgacggtacaagctgctggcagattgggttgcgccgctccagtaactgcctccaatgttgccggcgatcgccggcaaagcgacaatgagcgcatcccctgtcagaaaaaacatatcgagttcgtaaagaccaatgatcttggccgcggtcgtaccggcgaaggtgattacaccaagcataagggtgagcgcagtcgcttcggttaggatgacgatcgttgccacgaggtttaagaggagaagcaagagaccgtaggtgataagttgcccgatccacttagctgcgatgtcccgcgtgcgatcaaaaatatatccgacgaggatcagaggcccgatcgcgagaagcactttcgtgagaattccaacggcgtcgtaaactccgaaggcagaccagagcgtgccgtaaaggacccactgtgccccttggaaagcaaggatgtcctggtcgttcatcggaccgatttcggatgcgattttctgaaaaacggcctgggtcacggcgaacattgtatccaactgtgccggaacagtctgcagaggcaagccggttacactaaactgctgaacaaagtttgggaccgtcttttcgaagatggaaaccacatagtcttggtagttagcctgcccaacaattagagcaacaacgatggtgaccgtgatcacccgagtgataccgctacgggtatcgacttcgccgcgtatgactaaaataccctgaacaataatccaaagagtgacacaggcgatcaatggcgcactcaccgcctcctggatagtctcaagcatcgagtccaagcctgtcgtgaaggctacatcgaagatcgtatgaatggccgtaaacggcgccggaatcgtgaaattcatcgattggacctgaacttgactggtttgtcgcataatgttggataaaatgagctcgcattcggcgaggatgcgggcggatgaacaaatcgcccagccttaggggagggcaccaaagatgacagcggtcttttgatgctccttgcgttgagcggccgcctcttccgcctcgtgaaggccggcctgcgcggtagtcatcgttaataggcttgtcgcctgtacattttgaatcattgcgtcatggatctgcttgagaagcaaaccattggtcacggttgcctgcatgatattgcgagatcgggaaagctgagcagacgtatcagcattcgccgtcaagcgtttgtccatcgtttccagattgtcagccgcaatgccagcgctgtttgcggaaccggtgatctgcgatcgcaacaggtccgcttcagcatcactacccacgactgcacgatctgtatcgctggtgatcgcacgtgccgtggtcgacattggcattcgcggcgaaaacatttcattgtctaggtccttcgtcgaaggatactgatttttctggttgagcgaagtcagtagtccagtaacgccgtaggccgacgtcaacatcgtaaccatcgctatagtctgagtgagattctccgcagtcgcgagcgcagtcgcgagcgtctcagcctccgttgccgggtcgctaacaacaaactgcgcccgcgcgggctgaatatatagaaagctgcaggtcaaaactgttgcaataagttgcgtcgtcttcatcgtttcctaccttatcaatcttctgcctcgtggtgacgggccatgaattcgctgagccagccagatgagttgccttcttgtgcctcgcgtagtcgagttgcaaagcgcaccgtgttggcacgccccgaaagcacggcgacatattcacgcatatcccgcagatcaaattcgcagatgacgcttccactttctcgtttaagaagaaacttacggctgccgaccgtcatgtcttcacggatcgcctgaaattccttttcggtacatttcagtccatcgacataagccgatcgatctgcggttggtgatggatagaaaatcttcgtcatacattgcgcaaccaagctggctcctagcggcgattccagaacatgctctggttgctgcgttgccagtattagcatcccgttgttttttcgaacggtcaggaggaatttgtcgacgacagtcgaaaatttagggtttaacaaataggcgcgaaactcatcgcagctcatcacaaaacggcggccgtcgatcatggctccaatccgatgcaggagatatgctgcagcgggagcgcatacttcctcgtattcgagaagatgcgtcatgtcgaagccggtaatcgacggatctaactttacttcgtcaacttcgccgtcaaatgcccagccaagcgcatggccccggcaccagcgttggagccgcgctcctgcgccttcggcgggcccatgcaacaaaaattcacgtaaccccgcgattgaacgcatttgtggatcaaacgagagctgacgatggataccacggaccagacggcggttctcttccggagaaatcccaccccgaccatcactctcgatgagagccacgatccattcgcgcagaaaatcgtgtgaggctgctgtgttttctaggccacgcaacggcgccaacccgctgggtgtgcctctgtgaagtgccaaatatgttcctcctgtggcgcgaaccagcaattcgccaccccggtccttgtcaaagaacacgaccgtacctgcacggtcgaccatgctctgttcgagcatggctagaacaaacatcatgagcgtcgtcttacccctcccgataggcccgaatattgccgtcatgccaacatcgtgctcatgcgggatatagtcgaaaggcgttccgccattggtacgaaatcgggcaatcgcgttgccccagtggcctgagctggcgccctctggaaagttttcgaaagagacaaaccctgcgaaattgcgtgaagtgattgcgccagggcgtgtgcgccacttaaaattccccggcaattgggaccaataggccgcttccataccaataccttcttggacaaccacggcacctgcatccgccattcgtgtccgagcccgcgcgcccctgtccccaagactattgagatcgtctgcatagacgcaaaggctcaaatgatgtgagcccataacgaattcgttgctcgcaagtgcgtcctcagcctcggataatttgccgatttgagtcacggctttatcgccggaactcagcatctggctcgatttgaggctaagtttcgcgtgcgcttgcgggcgagtcaggaacgaaaaactctgcgtgagaacaagtggaaaatcgagggatagcagcgcgttgagcatgcccggccgtgtttttgcagggtattcgcgaaacgaatagatggatccaacgtaactgtcttttggcgttctgatctcgagtcctcgcttgccgcaaatgactctgtcggtataaatcgaagcgccgagtgagccgctgacgaccggaaccggtgtgaaccgaccagtcatgatcaaccgtagcgcttcgccaatttcggtgaagagcacaccctgcttctcgcggatgccaagacgatgcaggccatacgctttaagagagccagcgacaacatgccaaagatcttccatgttcctgatctggcccgtgagatcgttttccctttttccgcttagcttggtgaacctcctctttaccttccctaaagccgcctgtgggtagacaatcaacgtaaggaagtgttcattgcggaggagttggccggagagcacgcgctgttcaaaagcttcgttcaggctagcggcgaaaacactacggaagtgtcgcggcgccgatgatggcacgtcggcatgacgtacgaggtgagcatatattgacacatgatcatcagcgatattgcgcaacagcgtgttgaacgcacgacaacgcgcattgcgcatttcagtttcctcaagctcgaatgcaacgccatcaattctcgcaatggtcatgatcgatccgtcttcaagaaggacgatatggtcgctgaggtggccaatataagggagatagatctcaccggatctttcggtcgttccactcgcgccgagcatcacaccattcctctccctcgtgggggaaccctaattggatttgggctaacagtagcgcccccccaaactgcactatcaatgcttcttcccgcggtccgcaaaaatagcaggacgacgctcgccgcattgtagtctcgctccacgatgagccgggctgcaaaccataacggcacgagaacgacttcgtagagcgggttctgaacgataacgatgacaaagccggcgaacatcatgaataaccctgccaatgtcagtggcaccccaagaaacaatgcgggccgtgtggctgcgaggtaaagggtcgattcttccaaacgatcagccatcaactaccgccagtgagcgtttggccgaggaagctcgccccaaacatgataacaatgccgccgacgacgccggcaaccagcccaagcgaagcccgcccgaacatccaggagatcccgatagcgacaatgccgagaacagcgagtgactggccgaacggaccaaggataaacgtgcatatattgttaaccattgtggcggggtcagtgccgccacccgcagattgcgctgcggcgggtccggatgaggaaatgctccatgcaattgcaccgcacaagcttggggcgcagctcgatatcacgcgcatcatcgcattcgagagcgagaggcgatttagatgtaaacggtatctctcaaagcatcgcatcaatgcgcacctccttagtataagtcgaataagacttgattgtcgtctgcggatttgccgttgtcctggtgtggcggtggcggagcgattaaaccgccagcgccatcctcctgcgagcggcgctgatatgacccccaaacatcccacgtctcttcggattttagcgcctcgtgatcgtcttttggaggctcgattaacgcgggcaccagcgattgagcagctgtttcaacttttcgcacgtagccgtttgcaaaaccgccgatgaaattaccggtgttgtaagcggagatcgcccgacgaagcgcaaattgcttctcgtcaatcgtttcgccgcctgcataacgacttttcagcatgtttgcagcggcagataatgatgtgcacgcctggagcgcaccgtcaggtgtcagaccgagcatagaaaaatttcgagagtttatttgcatgaggccaacatccagcgaatgccgtgcatcgagacggtgcctgacgacttgggttgcttggctgtgatcttgccagtgaagcgtttcgccggtcgtgttgtcatgaatcgctaaaggatcaaagcgactctccaccttagctatcgccgcaagcgtagatgtcgcaactgatggggcacacttgcgagcaacatggtcaaactcagcagatgagagtggcgtggcaaggctcgacgaacagaaggagaccatcaaggcaagagaaagcgaccccgatctcttaagcataccttatctccttagctcgcaactaacaccgcctctcccgttggaagaagtgcgttgttttatgttgaagattatcgggagggtcggttactcgaaaattttcaattgcttctttatgatttcaattgaagcgagaaacctcgcccggcgtcttggaacgcaacatggaccgagaaccgcgcatccatgactaagcaaccggatcgacctattcaggccgcagttggtcaggtcaggctcagaacgaaaatgctcggcgaggttacgctgtctgtaaacccattcgatgaacgggaagcttccttccgattgctcttggcaggaatattggcccatgcctgcttgcgctttgcaaatgctcttatcgcgttggtatcatatgccttgtccgccagcagaaacgcactctaagcgattatttgtaaaaatgtttcggtcatgcggcggtcatgggcttgacccgctgtcagcgcaagacggatcggtcaaccgtcggcatcgacaacagcgtgaatcttggtggtcaaaccgccacgggaacgtcccatacagccatcgtcttgatcccgctgtttcccgtcgccgcatgttggtggacgcggacacaggaactgtcaatcatgacgacattctatcgaaagccttggaaatcacactcagaatatgatcccagacgtctgcctcacgccatcgtacaaagcgattgtagcaggttgtacaggaaccgtatcgatcaggaacgtctgcccagggcgggcccgtccggaagcgccacaagatgacattgatcacccgcgtcaacgcgcggcacgcgacgcggcttatttgggaacaaaggactgaacaacagtccattcgaaatcggtgacatcaaagcggggacgggttatcagtggcctccaagtcaagcctcaatgaatcaaaatcagaccgatttgcaaacctgatttatgagtgtgcggcctaaatgatgaaatcgtccttctagatcgcctccgtggtgtagcaacacctcgcagtatcgccgtgctgaccttggccagggaattgactggcaagggtgctttcacatgaccgctcttttggccgcgatagatgatttcgttgctgctttgggcacgtagaaggagagaagtcatatcggagaaattcctcctggcgcgagagcctgctctatcgcgacggcatcccactgtcgggaacagaccggatcattcacgaggcgaaagtcgtcaacacatgcgttataggcatcttcccttgaaggatgatcttgttgctgccaatctggaggtgcggcagccgcaggcagatgcgatctcagcgcaacttgcggcaaaacatctcactcacctgaaaaccactagcgagtctcgcgatcagacgaaggccttttacttaacgacacaatatccgatgtctgcatcacaggcgtcgctatcccagtcaatactaaagcggtgcaggaactaaagattactgatgacttaggcgtgccacgaggcctgagacgacgcgcgtagacagttttttgaaatcattatcaaagtgatggcctccgctgaagcctatcacctctgcgccggtctgtcggagagatgggcaagcattattacggtcttcgcgcccgtacatgcattggacgattgcagggtcaatggatctgagatcatccagaggattgccgcccttaccttccgtttcgagttggagccagcccctaaatgagacgacatagtcgacttgatgtgacaatgccaagagagagatttgcttaacccgatttttttgctcaagcgtaagcctattgaagcttgccggcatgacgtccgcgccgaaagaatatcctacaagtaaaacattctgcacaccgaaatgcttggtgtagacatcgattatgtgaccaagatccttagcagtttcgcttggggaccgctccgaccagaaataccgaagtgaactgacgccaatgacaggaatcccttccgtctgcagataggtaccatcgatagatctgctgcctcgcgcgtttcggtgatgacggtgaaaacctctgacacatgcagctcccggagacggtcacagcttgtctgtaagcggatgccgggagcagacaagcccgtcagggcgcgtcagcgggtgttggcgggtgtcggggcgcagccatgacccagtcacgtagcgatagcggagtgtatactggcttaactatgcggcatcagagcagattgtactgagagtgcaccatatgcggtgtgaaataccgcacagatgcgtaaggagaaaataccgcatcaggcgctcttccgcttcctcgctcactgactcgctgcgctcggtcgttcggctgcggcgagcggtatcagctcactcaaaggcggtaatacggttatccacagaatcaggggataacgcaggaaagaacatgtgagcaaaaggccagcaaaaggccaggaaccgtaaaaaggccgcgttgctggcgtttttccataggctccgcccccctgacgagcatcacaaaaatcgacgctcaagtcagaggtggcgaaacccgacaggactataaagataccaggcgtttccccctggaagctccctcgtgcgctctcctgttccgaccctgccgcttaccggatacctgtccgcctttctcccttcgggaagcgtggcgctttctcatagctcacgctgtaggtatctcagttcggtgtaggtcgttcgctccaagctgggctgtgtgcacgaaccccccgttcagcccgaccgctgcgccttatccggtaactatcgtcttgagtccaacccggtaagacacgacttatcgccactggcagcagccactggtaacaggattagcagagcgaggtatgtaggcggtgctacagagttcttgaagtggtggcctaactacggctacactagaaggacagtatttggtatctgcgctctgctgaagccagttaccttcggaaaaagagttggtagctcttgatccggcaaacaaaccaccgctggtagcggtggtttttttgtttgcaagcagcagattacgcgcagaaaaaaaggatctcaagaagatcctttgatcttttctacggggtctgacgctcagtggaacgaaaactcacgttaagggattttggtcatgagattatcaaaaaggatcttcacctagatccttttaaattaaaaatgaagttttaaatcaatctaaagtatatatgagtaaacttggtctgacagttaccaatgcttaatcagtgaggcacctatctcagcgatctgtctatttcgttcatccatagttgcctgactccccgtcgtgtagataactacgatacgggagggcttaccatctggccccagtgctgcaatgataccgcgagacccacgctcaccggctccagatttatcagcaataaaccagccagccggaagggccgagcgcagaagtggtcctgcaactttatccgcctccatccagtctattaattgttgccgggaagctagagtaagtagttcgccagttaatagtttgcgcaacgttgttgccattgctgcaggggggggggggggggggttccattgttcattccacggacaaaaacagagaaaggaaacgacagaggccaaaaagctcgctttcagcacctgtcgtttcctttcttttcagagggtattttaaataaaaacattaagttatgacgaagaagaacggaaacgccttaaaccggaaaattttcataaatagcgaaaacccgcgaggtcgccgccccgtaacctgtcggatcaccggaaaggacccgtaaagtgataatgattatcatctacatatcacaacgtgcgtggaggccatcaaaccacgtcaaataatcaattatgacgcaggtatcgtattaattgatctgcatcaacttaacgtaaaaacaacttcagacaatacaaatcagcgacactgaatacggggcaacctcatgtcccccccccccccccccctgcaggcatcgtggtgtcacgctcgtcgtttggtatggcttcattcagctccggttcccaacgatcaaggcgagttacatgatcccccatgttgtgcaaaaaagcggttagctccttcggtcctccgatcgttgtcagaagtaagttggccgcagtgttatcactcatggttatggcagcactgcataattctcttactgtcatgccatccgtaagatgcttttctgtgactggtgagtactcaaccaagtcattctgagaatagtgtatgcggcgaccgagttgctcttgcccggcgtcaacacgggataataccgcgccacatagcagaactttaaaagtgctcatcattggaaaacgttcttcggggcgaaaactctcaaggatcttaccgctgttgagatccagttcgatgtaacccactcgtgcacccaactgatcttcagcatcttttactttcaccagcgtttctgggtgagcaaaaacaggaaggcaaaatgccgcaaaaaagggaataagggcgacacggaaatgttgaatactcatactcttcctttttcaatattattgaagcatttatcagggttattgtctcatgagcggatacatatttgaatgtatttagaaaaataaacaaataggggttccgcgcacatttccccgaaaagtgccacctgacgtctaagaaaccattattatcatgacattaacctataaaaataggcgtatcacgaggccctttcgtcttcaagaattggtcgacgatcttgctgcgttcggatattttcgtggagttcccgccacagacccggattgaaggcgagatccagcaactcgcgccagatcatcctgtgacggaactttggcgcgtgatgactggccaggacgtcggccgaaagagcgacaagcagatcacgcttttcgacagcgtcggatttgcgatcgaggatttttcggcgctgcgctacgtccgcgaccgcgttgagggatcaagccacagcagcccactcgaccttctagccgacccagacgagccaagggatctttttggaatgctgctccgtcgtcaggctttccgacgtttgggtggttgaacagaagtcattatcgtacggaatgccaagcactcccgaggggaaccctgtggttggcatgcacatacaaatggacgaacggataaaccttttcacgcccttttaaatatccgttattctaataaacgctcttttctcttag

SEQ ID NO: 13 - DNA, 21 bp, artificial
  DNA sequence corresponding to amiRNA used to silence RCA
tctgcttcgtctcgtccacct

SEQ ID NO: 14 - DNA, 21 bp, artificial
  DNA sequence corresponding to artificial star sequence used to silence RCA (396h-RCA1a)
aggtggactagacgaagcaga

SEQ ID NO: 15 - DNA, 22 bp, artificial
  DNA sequence corresponding to artificial star sequence used to silence RCA (169r-RCA1a)
gggtggacgaagacgaagcagc

SEQ ID NO: 16 - DNA, 645 bp, artificial
  amiRNA precursor
ggatccgtcccccagatttgctaggacaccaccgtacccacaccccggatcagttaatatcgtagacataatggccctccctgccatctctgcttcgtctcgtccacctcatcatgcatgcagcaggctgtgctgtggacctgatcgagtttcaattgatccaagcaagcaagagggaggtggactagacgaagcagaaattgcagagagagaccagtcgttgatcggtcggagatctccccgaatcgatctcgatcggccggaattttgggggccggccgggaggtggatgatggggggtgattaccatctaggcggcgccgtgttggatgatgtaccaacatatcactataggctactttgggaacctcagatccccttcgggattggaggaaattgagatggaaatgaactaatttcttctctaacccccttcaatcacgaaggggattcgagtttccaaactagccctatatatatcagagctagggagggatattgctgcaacatgcatcacgaggtacagatatataattagggttctgctgcaatgttttgactatagatcgttagtgatctgctgtaattaataataatggtgatctcgaagcaattctaaacatcatagtagcaggcccaccatgg

SEQ ID NO: 17 - DNA, 872 bp, artificial
  amiRNA precursor
ggatccccctccacacagagaagcaaagaaaccacaccacagtcgtaggggaagggagaggagggagggtggcttctgctgggttgccatgtgctatgaggtagagaacgggatgtctgcttcgtctcgtccacctctcctggaacctggaggcgtctcagcttgctgtgctgtggcttagaacttagtgggtggacgaagacgaagcagccacctagttctcttcctctcgtgtatggccctcaagcaccgtcaagagatctaggacctgcattcatatatcatcagcccactccagaggaaacgtaagggcaagtatgcatctaacctcaagttgacatatttctatttctcctgcaattttgggtcttccaaaaaaatcagaaatttgagatatatgaatattattacaaacatacagggcttgcatacaatacaagcccaagccccatctggcatcatacgtcaaatttcatacatgcatctgtcagacaatatatatcctcactattttgtaccattatcgcatgctaatctttgatgtttgatggaaaagagccacttacttgtatcccctattcgcctgatggcgatacagacgaaaaggccaaatcgaagtacagcaggcgctgcacgacaagattcctcgaggctcctgatgctcagcaacagcaaattaaatgtcgtcatagcatctacagtaattaaattgtgtggcatacaaaagaaaacatgtactagcatgcatgacaggatatcggggcagaaaggtagcatcagctagcgttggagttgatgcgtaccatgttgagaaagtgttgcattcttttattcaaagggggcaaaatgaatagacgataggttacccatgg

SEQ ID NO: 18 - DNA, 58032 bp, artificial
  PHP39309
gtcggatcaccggaaaggacccgtaaagtgataatgattatcatctacatatcacaacgtgcgtggaggccatcaaaccacgtcaaataatcaattatgacgcaggtatcgtattaattgatctgcatcaacttaacgtaaaaacaacttcagacaatacaaatcagcgacactgaatacggggcaacctcatgtcccccccccccccccccctgcaggcatcgtggtgtcacgctcgtcgtttggtatggcttcattcagctccggttcccaacgatcaaggcgagttacatgatcccccatgttgtgcaaaaaagcggttagctccttcggtcctccgatcgttgtcagaagtaagttggccgcagtgttatcactcatggttatggcagcactgcataattctcttactgtcatgccatccgtaagatgcttttctgtgactggtgagtactcaaccaagtcattctgagaatagtgtatgcggcgaccgagttgctcttgcccggcgtcaacacgggataataccgcgccacatagcagaactttaaaagtgctcatcattggaaaacgttcttcggggcgaaaactctcaaggatcttaccgctgttgagatccagttcgatgtaacccactcgtgcacccaactgatcttcagcatcttttactttcaccagcgtttctgggtgagcaaaaacaggaaggcaaaatgccgcaaaaaagggaataagggcgacacggaaatgttgaatactcatactcttcctttttcaatattattgaagcatttatcagggttattgtctcatgagcggatacatatttgaatgtatttagaaaaataaacaaataggggttccgcgcacatttccccgaaaagtgccacctgacgtctaagaaaccattattatcatgacattaacctataaaaataggcgtatcacgaggccctttcgtcttcaagaattggtcgacgatcttgctgcgttcggatattttcgtggagttcccgccacagacccggattgaaggcgagatccagcaactcgcgccagatcatcctgtgacggaactttggcgcgtgatgactggccaggacgtcggccgaaagagcgacaagcagatcacgcttttcgacagcgtcggatttgcgatcgaggatttttcggcgctgcgctacgtccgcgaccgcgttgagggatcaagccacagcagcccactcgaccttctagccgacccagacgagccaagggatctttttggaatgctgctccgtcgtcaggctttccgacgtttgggtggttgaacagaagtcattatcgtacggaatgccaagcactcccgaggggaaccctgtggttggcatgcacatacaaatggacgaacggataaaccttttcacgcccttttaaatatccgttattctaataaacgctcttttctcttaggtttacccgccaatatatcctgtcaaacactgatagtttaaactgaaggcgggaaacgacaatctgatcatgagcggagaattaagggagtcacgttatgacccccgccgatgacgcgggacaagccgttttacgtttggaactgacagaaccgcaacgttgaaggagccactcagcaagctggtacgattgtaatacgactcactatagggcgaattgagcgctgtttaaacgctcttcaactggaagagcggttaccagagctggtcacctttgtccaccaagatggaactgcggccgctcattaattaagtcaggcgcgcctctagttgaagacacgttcatgtcttcatcgtaagaagacactcagtagtcttcggccagaatggccatctggattcagcaggcctagaaggccatttaaatcctgaggatctggtcttcctaaggacccgggatatcgctatcaactttgtatagaaaagttgggccgaattcgagctcggtacggccagaatggcccggaccgggttaccgaattcgagctcggtaccctgggatccgagctctcccatatggtcgacctgcaggcggccgcgaattcactagtaacggccgccagtgtgctggaattcgcccttgagctccctttaatctggcgctagatctgcatccgcggcttgcaaagataaatggcacatttagtgtgttattttgcaatacctttcatagtagatatccttaaatgcagttttaggcatgtttgggtaattaaataacatttttaggaggagttttagatttacctttctttcgtgatgactgatgacagacgtggggaattcaaatgcaactctagcgaaagttcatatatttttcataaatagctgaggctggggtaattattttttgtagaaaaatagaataggtggaatggtttggggaaggcgtaggcgctcgtggacgacgccccataaaagacaagaggcggaattgccatgaattcgaggtagctaagtaaggcgcatatatatgccaaaaattctactgtcactttccaatttcaatgcgctgccaaacaagccgccgacccatggatactgacttgaattcagcccaattctgtagatccaaacagggccggcgtcagtgcctcaggtgagagagcagcagacgatgcaaagagccaaaagtggaagcagacgcagccgaagccgaagcccaagcccaaaactgttttgtctttgcccagaaccgcgacgagcctaaactgccgcttcctcctatctacaagtccctggcacatcacgcatagtccaaccatggcgcgcaggcgataaggcgcgccacggggacgcgacatgtggtggcggacgcgatcaggatagggccaggctggccgggcgcggccacgggagaacggtggccactcgtcccacatccgcttcgtcctgtcctgtactgcgtcctgcccccaacgagagccggagccggccatcccgtcgcacactctccccctctatatatgccgtcggtgtgggggagcctactacaggacgacccaagcaagcaagcaagcagcgagtacatacatactaggcagccaggcagtcaagcttatggcggccgccttctcctccaccgtcggagctccggtgggtgaccgcgcgtgttaattccaagcatctgctagctgctctgctactagttcagcgtcgggatcttcttcttcatgcatgcatttcatgatcatatatatatctcgatccttgagaccttcttgacggcatatatatgtatatgtacatgcatcatgcatcgaccgatcatcaggcctccaccccgaccaggagcagcttcctcgggaagaagctcaacaagccgcaggtgtcgtccgcggccgtgacctatcatggcaagagctccagcagcaacagcaggttcaaggccatggctgccaaggaagtcgatgaaacaaaacaatcggaccaggatcgttggaaaggcctggcctacgacgtctcggacgaccagcaggacatcaccaggggcaagggcctcgtcgacaacctcttccaggcgcctaccggggacggcacccacgtcgccgtgctcagctcctacgactacatcagccagggccaaaagtcctacgatttcgacaacatgatggatggcttctacatagccaagagcttcatggacaagctcgtcgtccatttgagcaaaaattttatgtccctgccaaacatcaaggttcccctcatcctgggtatctggggaggcaaaggccagggaaaatcgttccaatgcgagctggtcttcgccaagatgggcatcacgtacgttaatttatttcgattcgtctattattattgtcttcgataatatatactagctagctagtagtaaatcattccaatgcatgcatgcatgcagccccatcatgatgagcgccggcgagctggagagcggcaacgccggagagcccgccaagctcatcaggcagcgctaccgtgaggccgccgacaccatcaagaagggcaagatgtcctgcctcttcatcaacgacctcgacgccggcgcgggtcgcatgggcggcaccacccagtacacggtgaacaaccagatggtcaacgccaccctgatgaacatcgccgacaaccccaccaacgtgcggctcccggggatgtacaacaaggaggacaacccccgcgtgcccatcatcgtcaccggcaacgacttctccacgctctacgcgccgctcatccgcgacggccgcatggagaagttctactgggcgcccacccgcgaggaccgcatcggcgtctgcaagggcatcttccgcaccgacggcgtcgacgaggagcacgtcgtccgtctggtcgacaccttccctggccagtccatcgacttcttcggcgcgctgcgtgcccgggtctacgacgacgaggtccgaaagtgggtgagcgagaccggcgtcgagaacatcgccaagaagctcgtcaactccaaggagggcccgcccacgttcgagcagcccaagataacgatcgagaagctcttggagtacggacacatgctggtggcggagcaggagaacgtcaagcgtgtgcagcttgctgacaagtacctcaacgaggctgctcttggtgaagccaacgaggacgccatgaagactggctccttcttcaagtagatcgatagacttgtccatcttctggattggccaacttaattaatgtatgaaataaaaggatgcacacatagtgacatgctaatcactataatgtgggcatcaaagttgtgtgttatgtgtaattactagttatctgaataaaagagaaagagatcatccatatttcttatcctaaatgaatgtcacgtgtctttataattctttgatgaaccagatgcatttcattaaccaaatccatatacatataaatattaatcatatataattaatatcaattgggttagcaaaacaaatctagtctaggtgtgttttgcgaatgcggcctcaagtttgtacaaaaaagcaggctccggccagaatggcccggaccgggttaccgaattcgagctcggtaccaggtttttgtgatctgatgataagtggttggttcgtgtctcatgcacttgggaggtgatctatttcacctggtgtagtttgtgtttccgtcagttggaaaaacttatccctatcgatttcgttttcattttctgcttttcttttatgtaccttcgtttgggcttgtaacgggcctttgtatttcaactctcaataataatccaagtgcatgttaaacaatttgtcatctgtttcggctttgatatactactggtgaagatgggccgtactactgcatcacaacgaaaaataataataagatgaaaaacttgaagtggaaaaaaaaaaaaacttgaatgttcactactactcattgaccataatgtttaacatacatagctcaatagtatttttgtgaatatggcaacacaaacagtccaaaacaattgtctcttactataccaaaccaagggcgccgcttgtttgccactctttgtgtgcaatagtgtgattaccacatctccacattcaatatattccctgaattatctgacgattttgatggctcactgttttcccaagtcttgaattgtcttctgtgcgccagtcaaatgcatatgtgttgagtttatcttttaaatatcaagcttttgtttttaacttttgtttgtaaccaaaaactcacagtaggagtttgatcacataattttatgtttgcctttgcaatttctagtgagtctttgattaaaagcttgaaaagaaaatgcagccaagcttaccaagtaagttatgtgtattaaccagaggaagagagaatcttgcaaaatttcaacaaacacaaaaagaagtattactacgattggtggagaaagaaaacgattccaaatcttgaactgttgttgtaaaagcatagcagaaagtgggagacaaccgaaatagaaatgactataacttaatttaatgttatcattataatttcttctagcaaatatttagaaagtaaatatcacatcaacctttaatgtaattaagctttctctttttgattcatgtgagatgaaaagaaaaaaaagaagagaaaagtgtagaaaacacatcatttctaagctgaaggtacatagtacccttgtacttttggtttcacctgcatagagaaaacccacaagaatatgacagtctgatttgtcagtctcattctcaagcaacatttctctatccgttactttcatggtgaataacacaatccatcatcaatactttgtgttactcagaaactgaaagttattccgagtcttgcatatctttggacctactcgtttttctaccattattgctgattgttaagctctcgctacttgaatcggcattgttggagtgggaaggttcaaaaaattggagttatgactagttgtctctttctatgtacgatggagaaaatgaataaacaactgagaaaatggctcttgtttagttgatgatgctcttaagctttccactggttgccatatatgatttgggcatttcactttgatcttaatgggccttgtaaagcccaagactcatgattatctttagttgatgctcttaattaggtgtgggcaaataattcaaactgtatgtacccgaccaaaaccaaagcaaaaataatcgaaccaaaccgaaaatttaaaaataaccgaatgaaaactaaatcctataactgaaagaactgaaaccgaatcaaaatatttaatgtaaccaaaaatatccgaaatataattatattgtcaaaaatattaataatttctagattaaataattaaaaatacttaaaaatttatataaaatagtaaaaatactcgaaaataaccacaaatattcaaaaacaaccgaaatatcccaaaatattcaaagcaaaataaccgaatggataccaaattttaaaaccgaaaaaactggaacaaaaccaaaatcgaaccaaaatttcaaaaatcgaataaatactaaactttagaacaaaaaaaaacgataaccgaatgtatacgaaccaaagccgaattagataaccgaacgtccaggactactcttaatctttccgccacttatgatttgggctattactttgtttataatgagccttttcaagctcaagttcatgattgtccgtgagatgagaaactgacttgttggattcgaaaccctagctagtattggttaatacttaatacataaatgacctgcattgacatcatcatccaagaaaataaaaattgtatgcttgagatatttagttttcctagctaggttttctttattttagtaccgaatctttaggtgtgccacgttaatttagacccattttttcatacttaccaactgagtctagtttaatcatgactataatcgtataaaatgattcagtcgacgtcattgcgaacgtatataaaatcatccaaattgacgtcattccaaagaggtaagcatgcttatctaagagtccgagcatactaaacaagacgacattttatttgcactccaaatcaaattttgtattgcctaaagaaaaacaatcaaactcaagtttcttaaaattaatttcattcaaactaatcactttcaatatctcacatattattcatgccatttctatttgtctaaacatgatttaaaaaaaaaagtaaaatacaaagattactatgcaaaaactctataaaaaaaaattcaaatttcttatttatttgtgacatcaaattttcaaaataatttttttaattatcggttgatccggtcagtcgataaaaacataaactttcagcgaccgttaaaactttcctactaccgatttagagaaaatcttagcttgaaacgtaattgtaacctgccttcatgcaagtcgcaagatatgtcatcctaagttgtatatgttttctcaaaagatgtatttacttgagaaaatacgtttcaacgttgatggacaaccaattaagaatcaagcacctttcgtaatcaatttaggcttatcgtctaaggtatactgatttacgacagttgactagacttataaggaacaaaataatagaataatttcgtcaagaaaaattgattttggactcatactttacataatattttactcttaaatttatttaagtggctcctcgcatgatcccaaagagcaagcctagactatatggaaaagtttctaaacacttcacctaatcatagagactaagatggtaattcgtaaacgacaaagcctagtgacactgtccattgtaaaattccacatcatattagtattaaacatatacatgtagtttcctgaacacatgtagtatcaaacacacttcgtggcttcttcctcgaaacctggtaccctgggatctgtgcagcgtgacccggtcgtgcccctctctagagataatgagcattgcatgtctaagttataaaaaattaccacatattttttttgtcacacttgtttgaagtgcagtttatctatctttatacatatatttaaactttactctacgaataatataatctatagtactacaataatatcagtgttttagagaatcatataaatgaacagttagacatggtctaaaggacaattgagtattttgacaacaggactctacagttttatctttttagtgtgcatgtgttctcctttttttttgcaaatagcttcacctatataatacttcatccattttattagtacatccatttagggtttagggttaatggtttttatagactaatttttttagtacatctattttattctattttagcctctaaattaagaaaactaaaactctattttagtttttttatttaataatttagatataaaatagaataaaataaagtgactaaaaattaaacaaataccctttaagaaattaaaaaaactaaggaaacatttttcttgtttcgagtagataatgccagcctgttaaacgccgtcgacgagtctaacggacaccaaccagcgaaccagcagcgtcgcgtcgggccaagcgaagcagacggcacggcatctctgtcgctgcctctggacccctctcgagagttccgctccaccgttggacttgctccgctgtcggcatccagaaattgcgtggcggagcggcagacgtgagccggcacggcaggcggcctcctcctcctctcacggcaccggcagctacgggggattcctttcccaccgctccttcgctttcccttcctcgcccgccgtaataaatagacaccccctccacaccctctttccccaacctcgtgttgttcggagcgcacacacacacaaccatatctcccccaaatccacccgtcggcacctccgcttcaaggtacgccgctcgtcctcccccccccccctctctaccttctctagatcggcgttccggtccatgcatggttagggcccggtagttctacttctgttcatgtttgtgttagatccgtgtttgtgttagatccgtgctgctagcgttcgtacacggatgcgacctgtacgtcagacacgttctgattgctaacttgccagtgtttctctttggggaatcctgggatggctctagccgttccgcagacgggatcgatttcatgattttttttgtttcgttgcatagggtttggtttgcccttttcctttatttcaatatatgccgtgcacttgtttgtcgggtcatcttttcatgcttttttttgtcttggttgtgatgatgtggtctggttgggcggtcgttctagatcggagtagaattctgtttcaaactacctggtggatttattaattttggatctgtatgtgtgtgccatacatattcatagttacgaattgaagatgatggatggaaatatcgatctaggataggtatacatgttgatgcgggttttactgatgcatatacagagatgctttttgttcgcttggttgtgatgatgtggtgtggttgggcggtcgttcattcgttctagatcggagtagaatactgtttcaaactacctggtgtatttattaattttggaactgtatgtgtgtgtcatacatcttcatagttacgagtttaagatggatggaaatatcgatctaggataggtatacatgttgatgtgggttttactgatgcatatacatgatggcatatgcagcatctattcatatgctctaaccttgagtacctatctattataataaacaagtatgttttataattattttgatcttgatatacttggatgatggcatatgcagcagctatatgtggatttttttagccctgccttcatacgctatttatttgcttggtactgtttcttttgtcgatgctcaccctgttgtttggtgttacttctgcagggatccgtcccccagatttgctaggacaccaccgtacccacaccccggatcagttaatatcgtagacataatggccctccctgccatctctgcttcgtctcgtccacctcatcatgcatgcagcaggctgtgctgtggacctgatcgagtttcaattgatccaagcaagcaagagggaggtggactagacgaagcagaaattgcagagagagaccagtcgttgatcggtcggagatctccccgaatcgatctcgatcggccggaattttgggggccggccgggaggtggatgatggggggtgattaccatctaggcggcgccgtgttggatgatgtaccaacatatcactataggctactttgggaacctcagatccccttcgggattggaggaaattgagatggaaatgaactaatttcttctctaacccccttcaatcacgaaggggattcgagtttccaaactagccctatatatatcagagctagggagggatattgctgcaacatgcatcacgaggtacagatatataattagggttctgctgcaatgttttgactatagatcgttagtgatctgctgtaattaataataatggtgatctcgaagcaattctaaacatcatagtagcaggcccaccatggagacttgtccatcttctggattggccaacttaattaatgtatgaaataaaaggatgcacacatagtgacatgctaatcactataatgtgggcatcaaagttgtgtgttatgtgtaattactagttatctgaataaaagagaaagagatcatccatatttcttatcctaaatgaatgtcacgtgtctttataattctttgatgaaccagatgcatttcattaaccaaatccatatacatataaatattaatcatatataattaatatcaattgggttagcaaaacaaatctagtctaggtgtgttttgcgaatgcggcccccgggcacccagctttcttgtacaaagtggccgttaacggatcggccagaatggcccggaccgaagctggccgctctagaactagtggatctcgatgtgtagtctacgagaagggttaaccgtctcttcgtgagaataaccgtggcctaaaaataagccgatgaggataaataaaatgtggtggtacagtacttcaagaggtttactcatcaagaggatgcttttccgatgagctctagtagtacatcggacctcacatacctccattgtggtgaaatattttgtgctcatttagtgatgggtaaattttgtttatgtcactctaggttttgacatttcagttttgccactcttaggttttgacaaataatttccattccgcggcaaaagcaaaacaattttattttacttttaccactcttagctttcacaatgtatcacaaatgccactctagaaattctgtttatgccacagaatgtgaaaaaaaacactcacttatttgaagccaaggtgttcatggcatggaaatgtgacataaagtaacgttcgtgtataagaaaaaattgtactcctcgtaacaagagacggaaacatcatgagacaatcgcgtttggaaggctttgcatcacctttggatgatgcgcatgaatggagtcgtctgcttgctagccttcgcctaccgcccactgagtccgggcggcaactaccatcggcgaacgacccagctgacctctaccgaccggacttgaatgcgctaccttcgtcagcgacgatggccgcgtacgctggcgacgtgcccccgcatgcatggcggcacatggcgagctcagaccgtgcgtggctggctacaaatacgtaccccgtgagtgccctagctagaaacttacacctgcaactgcgagagcgagcgtgtgagtgtagccgagtagatcccccggtcgccaccatggcctcctccgagaacgtcatcaccgagttcatgcgcttcaaggtgcgcatggagggcaccgtgaacggccacgagttcgagatcgagggcgagggcgagggccgcccctacgagggccacaacaccgtgaagctgaaggtgaccaagggcggccccctgcccttcgcctgggacatcctgtccccccagttccagtacggctccaaggtgtacgtgaagcaccccgccgacatccccgactacaagaagctgtccttccccgagggcttcaagtgggagcgcgtgatgaacttcgaggacggcggcgtggcgaccgtgacccaggactcctccctgcaggacggctgcttcatctacaaggtgaagttcatcggcgtgaacttcccctccgacggccccgtgatgcagaagaagaccatgggctgggaggcctccaccgagcgcctgtacccccgcgacggcgtgctgaagggcgagacccacaaggccctgaagctgaaggacggcggccactacctggtggagttcaagtccatctacatggccaagaagcccgtgcagctgcccggctactactacgtggacgccaagctggacatcacctcccacaacgaggactacaccatcgtggagcagtacgagcgcaccgagggccgccaccacctgttcctgtagcggcccatggatattcgaacgcgtaggtaccacatggttaacctagacttgtccatcttctggattggccaacttaattaatgtatgaaataaaaggatgcacacatagtgacatgctaatcactataatgtgggcatcaaagttgtgtgttatgtgtaattactagttatctgaataaaagagaaagagatcatccatatttcttatcctaaatgaatgtcacgtgtctttataattctttgatgaaccagatgcatttcattaaccaaatccatatacatataaatattaatcatatataattaatatcaattgggttagcaaaacaaatctagtctaggtgtgttttgcgaatgcggccgccaccgcggtggagctcgaattccggtccgggcctagaaggccagcttcggccgccccgggcaactttattatacaaagttgatagatatcggaccgattaaactttaattcggtccgaagcttgcatgcctgcagtgcagcgtgacccggtcgtgcccctctctagagataatgagcattgcatgtctaagttataaaaaattaccacatattttttttgtcacacttgtttgaagtgcagtttatctatctttatacatatatttaaactttactctacgaataatataatctatagtactacaataatatcagtgttttagagaatcatataaatgaacagttagacatggtctaaaggacaattgagtattttgacaacaggactctacagttttatctttttagtgtgcatgtgttctcctttttttttgcaaatagcttcacctatataatacttcatccattttattagtacatccatttagggtttagggttaatggtttttatagactaatttttttagtacatctattttattctattttagcctctaaattaagaaaactaaaactctattttagtttttttatttaataatttagatataaaatagaataaaataaagtgactaaaaattaaacaaataccctttaagaaattaaaaaaactaaggaaacatttttcttgtttcgagtagataatgccagcctgttaaacgccgtcgacgagtctaacggacaccaaccagcgaaccagcagcgtcgcgtcgggccaagcgaagcagacggcacggcatctctgtcgctgcctctggacccctctcgagagttccgctccaccgttggacttgctccgctgtcggcatccagaaattgcgtggcggagcggcagacgtgagccggcacggcaggcggcctcctcctcctctcacggcaccggcagctacgggggattcctttcccaccgctccttcgctttcccttcctcgcccgccgtaataaatagacaccccctccacaccctctttccccaacctcgtgttgttcggagcgcacacacacacaaccagatctcccccaaatccacccgtcggcacctccgcttcaaggtacgccgctcgtcctcccccccccccctctctaccttctctagatcggcgttccggtccatgcatggttagggcccggtagttctacttctgttcatgtttgtgttagatccgtgtttgtgttagatccgtgctgctagcgttcgtacacggatgcgacctgtacgtcagacacgttctgattgctaacttgccagtgtttctctttggggaatcctgggatggctctagccgttccgcagacgggatcgatttcatgattttttttgtttcgttgcatagggtttggtttgcccttttcctttatttcaatatatgccgtgcacttgtttgtcgggtcatcttttcatgcttttttttgtcttggttgtgatgatgtggtctggttgggcggtcgttctagatcggagtagaattctgtttcaaactacctggtggatttattaattttggatctgtatgtgtgtgccatacatattcatagttacgaattgaagatgatggatggaaatatcgatctaggataggtatacatgttgatgcgggttttactgatgcatatacagagatgctttttgttcgcttggttgtgatgatgtggtgtggttgggcggtcgttcattcgttctagatcggagtagaatactgtttcaaactacctggtgtatttattaattttggaactgtatgtgtgtgtcatacatcttcatagttacgagtttaagatggatggaaatatcgatctaggataggtatacatgttgatgtgggttttactgatgcatatacatgatggcatatgcagcatctattcatatgctctaaccttgagtacctatctattataataaacaagtatgttttataattattttgatcttgatatacttggatgatggcatatgcagcagctatatgtggatttttttagccctgccttcatacgctatttatttgcttggtactgtttcttttgtcgatgctcaccctgttgtttggtgttacttctgcaggtcgactttaacttagcctaggatccacacgacaccatgtcccccgagcgccgccccgtcgagatccgcccggccaccgccgccgacatggccgccgtgtgcgacatcgtgaaccactacatcgagacctccaccgtgaacttccgcaccgagccgcagaccccgcaggagtggatcgacgacctggagcgcctccaggaccgctacccgtggctcgtggccgaggtggagggcgtggtggccggcatcgcctacgccggcccgtggaaggcccgcaacgcctacgactggaccgtggagtccaccgtgtacgtgtcccaccgccaccagcgcctcggcctcggctccaccctctacacccacctcctcaagagcatggaggcccagggcttcaagtccgtggtggccgtgatcggcctcccgaacgacccgtccgtgcgcctccacgaggccctcggctacaccgcccgcggcaccctccgcgccgccggctacaagcacggcggctggcacgacgtcggcttctggcagcgcgacttcgagctgccggccccgccgcgcccggtgcgcccggtgacgcagatctgagtcgaaacctagacttgtccatcttctggattggccaacttaattaatgtatgaaataaaaggatgcacacatagtgacatgctaatcactataatgtgggcatcaaagttgtgtgttatgtgtaattactagttatctgaataaaagagaaagagatcatccatatttcttatcctaaatgaatgtcacgtgtctttataattctttgatgaaccagatgcatttcattaaccaaatccatatacatataaatattaatcatatataattaatatcaattgggttagcaaaacaaatctagtctaggtgtgttttgcgaatgcggccgccaccgcggtggagctcgaattcattccgattaatcgtggcctcttgctcttcaggatgaagagctatgtttaaacgtgcaagcgctactagacaattcagtacattaaaaacgtccgcaatgtgttattaagttgtctaagcgtcaatttgtttacaccacaatatatcctgccaccagccagccaacagctccccgaccggcagctcggcacaaaatcaccactcgatacaggcagcccatcagtccgggacggcgtcagcgggagagccgttgtaaggcggcagactttgctcatgttaccgatgctattcggaagaacggcaactaagctgccgggtttgaaacacggatgatctcgcggagggtagcatgttgattgtaacgatgacagagcgttgctgcctgtgatcaaatatcatctccctcgcagagatccgaattatcagccttcttattcatttctcgcttaaccgtgacaggctgtcgatcttgagaactatgccgacataataggaaatcgctggataaagccgctgaggaagctgagtggcgctatttctttagaagtgaacgttgacgatcgtcgaccgtaccccgatgaattaattcggacgtacgttctgaacacagctggatacttacttgggcgattgtcatacatgacatcaacaatgtacccgtttgtgtaaccgtctcttggaggttcgtatgacactagtggttcccctcagcttgcgactagatgttgaggcctaacattttattagagagcaggctagttgcttagatacatgatcttcaggccgttatctgtcagggcaagcgaaaattggccatttatgacgaccaatgccccgcagaagctcccatctttgccgccatagacgccgcgccccccttttggggtgtagaacatccttttgccagatgtggaaaagaagttcgttgtcccattgttggcaatgacgtagtagccggcgaaagtgcgagacccatttgcgctatatataagcctacgatttccgttgcgactattgtcgtaattggatgaactattatcgtagttgctctcagagttgtcgtaatttgatggactattgtcgtaattgcttatggagttgtcgtagttgcttggagaaatgtcgtagttggatggggagtagtcatagggaagacgagcttcatccactaaaacaattggcaggtcagcaagtgcctgccccgatgccatcgcaagtacgaggcttagaaccaccttcaacagatcgcgcatagtcttccccagctctctaacgcttgagttaagccgcgccgcgaagcggcgtcggcttgaacgaattgttagacattatttgccgactaccttggtgatctcgcctttcacgtagtgaacaaattcttccaactgatctgcgcgcgaggccaagcgatcttcttgtccaagataagcctgcctagcttcaagtatgacgggctgatactgggccggcaggcgctccattgcccagtcggcagcgacatccttcggcgcgattttgccggttactgcgctgtaccaaatgcgggacaacgtaagcactacatttcgctcatcgccagcccagtcgggcggcgagttccatagcgttaaggtttcatttagcgcctcaaatagatcctgttcaggaaccggatcaaagagttcctccgccgctggacctaccaaggcaacgctatgttctcttgcttttgtcagcaagatagccagatcaatgtcgatcgtggctggctcgaagatacctgcaagaatgtcattgcgctgccattctccaaattgcagttcgcgcttagctggataacgccacggaatgatgtcgtcgtgcacaacaatggtgacttctacagcgcggagaatctcgctctctccaggggaagccgaagtttccaaaaggtcgttgatcaaagctcgccgcgttgtttcatcaagccttacagtcaccgtaaccagcaaatcaatatcactgtgtggcttcaggccgccatccactgcggagccgtacaaatgtacggccagcaacgtcggttcgagatggcgctcgatgacgccaactacctctgatagttgagtcgatacttcggcgatcaccgcttccctcatgatgtttaactcctgaattaagccgcgccgcgaagcggtgtcggcttgaatgaattgttaggcgtcatcctgtgctcccgagaaccagtaccagtacatcgctgtttcgttcgagacttgaggtctagttttatacgtgaacaggtcaatgccgccgagagtaaagccacattttgcgtacaaattgcaggcaggtacattgttcgtttgtgtctctaatcgtatgccaaggagctgtctgcttagtgcccactttttcgcaaattcgatgagactgtgcgcgactcctttgcctcggtgcgtgtgcgacacaacaatgtgttcgatagaggctagatcgttccatgttgagttgagttcaatcttcccgacaagctcttggtcgatgaatgcgccatagcaagcagagtcttcatcagagtcatcatccgagatgtaatccttccggtaggggctcacacttctggtagatagttcaaagccttggtcggataggtgcacatcgaacacttcacgaacaatgaaatggttctcagcatccaatgtttccgccacctgctcagggatcaccgaaatcttcatatgacgcctaacgcctggcacagcggatcgcaaacctggcgcggcttttggcacaaaaggcgtgacaggtttgcgaatccgttgctgccacttgttaacccttttgccagatttggtaactataatttatgttagaggcgaagtcttgggtaaaaactggcctaaaattgctggggatttcaggaaagtaaacatcaccttccggctcgatgtctattgtagatatatgtagtgtatctacttgatcgggggatctgctgcctcgcgcgtttcggtgatgacggtgaaaacctctgacacatgcagctcccggagacggtcacagcttgtctgtaagcggatgccgggagcagacaagcccgtcagggcgcgtcagcgggtgttggcgggtgtcggggcgcagccatgacccagtcacgtagcgatagcggagtgtatactggcttaactatgcggcatcagagcagattgtactgagagtgcaccatatgcggtgtgaaataccgcacagatgcgtaaggagaaaataccgcatcaggcgctcttccgcttcctcgctcactgactcgctgcgctcggtcgttcggctgcggcgagcggtatcagctcactcaaaggcggtaatacggttatccacagaatcaggggataacgcaggaaagaacatgtgagcaaaaggccagcaaaaggccaggaaccgtaaaaaggccgcgttgctggcgtttttccataggctccgcccccctgacgagcatcacaaaaatcgacgctcaagtcagaggtggcgaaacccgacaggactataaagataccaggcgtttccccctggaagctccctcgtgcgctctcctgttccgaccctgccgcttaccggatacctgtccgcctttctcccttcgggaagcgtggcgctttctcatagctcacgctgtaggtatctcagttcggtgtaggtcgttcgctccaagctgggctgtgtgcacgaaccccccgttcagcccgaccgctgcgccttatccggtaactatcgtcttgagtccaacccggtaagacacgacttatcgccactggcagcagccactggtaacaggattagcagagcgaggtatgtaggcggtgctacagagttcttgaagtggtggcctaactacggctacactagaaggacagtatttggtatctgcgctctgctgaagccagttaccttcggaaaaagagttggtagctcttgatccggcaaacaaaccaccgctggtagcggtggtttttttgtttgcaagcagcagattacgcgcagaaaaaaaggatctcaagaagatcctttgatcttttctacggggtctgacgctcagtggaacgaaaactcacgttaagggattttggtcatgagattatcaaaaaggatcttcacctagatccttttaaattaaaaatgaagttttaaatcaatctaaagtatatatgagtaaacttggtctgacagttaccaatgcttaatcagtgaggcacctatctcagcgatctgtctatttcgttcatccatagttgcctgactccccgtcgtgtagataactacgatacgggagggcttaccatctggccccagtgctgcaatgataccgcgagacccacgctcaccggctccagatttatcagcaataaaccagccagccggaagggccgagcgcagaagtggtcctgcaactttatccgcctccatccagtctattaattgttgccgggaagctagagtaagtagttcgccagttaatagtttgcgcaacgttgttgccattgctgcagggggggggggggggggggacttccattgttcattccacggacaaaaacagagaaaggaaacgacagaggccaaaaagcctcgctttcagcacctgtcgtttcctttcttttcagagggtattttaaataaaaacattaagttatgacgaagaagaacggaaacgccttaaaccggaaaattttcataaatagcgaaaacccgcgaggtcgccgccccgtaacctgtcggatcaccggaaaggacccgtaaagtgataatgattatcatctacatatcacaacgtgcgtggaggccatcaaaccacgtcaaataatcaattatgacgcaggtatcgtattaattgatctgcatcaacttaacgtaaaaacaacttcagacaatacaaatcagcgacactgaatacggggcaacctcatgtcccccccccccccccccctgcaggcatcgtggtgtcacgctcgtcgtttggtatggcttcattcagctccggttcccaacgatcaaggcgagttacatgatcccccatgttgtgcaaaaaagcggttagctccttcggtcctccgatcgttgtcagaagtaagttggccgcagtgttatcactcatggttatggcagcactgcataattctcttactgtcatgccatccgtaagatgcttttctgtgactggtgagtactcaaccaagtcattctgagaatagtgtatgcggcgaccgagttgctcttgcccggcgtcaacacgggataataccgcgccacatagcagaactttaaaagtgctcatcattggaaaacgttcttcggggcgaaaactctcaaggatcttaccgctgttgagatccagttcgatgtaacccactcgtgcacccaactgatcttcagcatcttttactttcaccagcgtttctgggtgagcaaaaacaggaaggcaaaatgccgcaaaaaagggaataagggcgacacggaaatgttgaatactcatactcttcctttttcaatattattgaagcatttatcagggttattgtctcatgagcggatacatatttgaatgtatttagaaaaataaacaaataggggttccgcgcacatttccccgaaaagtgccacctgacgtctaagaaaccattattatcatgacattaacctataaaaataggcgtatcacgaggccctttcgtcttcaagaattcggagcttttgccattctcaccggattcagtcgtcactcatggtgatttctcacttgataaccttatttttgacgaggggaaattaataggttgtattgatgttggacgagtcggaatcgcagaccgataccaggatcttgccatcctatggaactgcctcggtgagttttctccttcattacagaaacggctttttcaaaaatatggtattgataatcctgatatgaataaattgcagtttcatttgatgctcgatgagtttttctaatcagaattggttaattggttgtaacactggcagagcattacgctgacttgacgggacggcggctttgttgaataaatcgaacttttgctgagttgaaggatcagatcacgcatcttcccgacaacgcagaccgttccgtggcaaagcaaaagttcaaaatcaccaactggtccacctacaacaaagctctcatcaaccgtggctccctcactttctggctggatgatggggcgattcaggcctggtatgagtcagcaacaccttcttcacgaggcagacctcagcgccagaaggccgccagagaggccgagcgcggccgtgaggcttggacgctagggcagggcatgaaaaagcccgtagcgggctgctacgggcgtctgacgcggtggaaagggggaggggatgttgtctacatggctctgctgtagtgagtgggttgcgctccggcagcggtcctgatcaatcgtcaccctttctcggtccttcaacgttcctgacaacgagcctccttttcgccaatccatcgacaatcaccgcgagtccctgctcgaacgctgcgtccggaccggcttcgtcgaaggcgtctatcgcggcccgcaacagcggcgagagcggagcctgttcaacggtgccgccgcgctcgccggcatcgctgtcgccggcctgctcctcaagcacggccccaacagtgaagtagctgattgtcatcagcgcattgacggcgtccccggccgaaaaacccgcctcgcagaggaagcgaagctgcgcgtcggccgtttccatctgcggtgcgcccggtcgcgtgccggcatggatgcgcgcgccatcgcggtaggcgagcagcgcctgcctgaagctgcgggcattcccgatcagaaatgagcgccagtcgtcgtcggctctcggcaccgaatgcgtatgattctccgccagcatggcttcggccagtgcgtcgagcagcgcccgcttgttcctgaagtgccagtaaagcgccggctgctgaacccccaaccgttccgccagtttgcgtgtcgtcagaccgtctacgccgacctcgttcaacaggtccagggcggcacggatcactgtattcggctgcaactttgtcatgcttgacactttatcactgataaacataatatgtccaccaacttatcagtgataaagaatccgcgcgttcaatcggaccagcggaggctggtccggaggccagacgtgaaacccaacatacccctgatcgtaattctgagcactgtcgcgctcgacgctgtcggcatcggcctgattatgccggtgctgccgggcctcctgcgcgatctggttcactcgaacgacgtcaccgcccactatggcattctgctggcgctgtatgcgttggtgcaatttgcctgcgcacctgtgctgggcgcgctgtcggatcgtttcgggcggcggccaatcttgctcgtctcgctggccggcgccactgtcgactacgccatcatggcgacagcgcctttcctttgggttctctatatcgggcggatcgtggccggcatcaccggggcgactggggcggtagccggcgcttatattgccgatatcactgatggcgatgagcgcgcgcggcacttcggcttcatgagcgcctgtttcgggttcgggatggtcgcgggacctgtgctcggtgggctgatgggcggtttctccccccacgctccgttcttcgccgcggcagccttgaacggcctcaatttcctgacgggctgtttccttttgccggagtcgcacaaaggcgaacgccggccgttacgccgggaggctctcaacccgctcgcttcgttccggtgggcccggggcatgaccgtcgtcgccgccctgatggcggtcttcttcatcatgcaacttgtcggacaggtgccggccgcgctttgggtcattttcggcgaggatcgctttcactgggacgcgaccacgatcggcatttcgcttgccgcatttggcattctgcattcactcgcccaggcaatgatcaccggccctgtagccgcccggctcggcgaaaggcgggcactcatgctcggaatgattgccgacggcacaggctacatcctgcttgccttcgcgacacggggatggatggcgttcccgatcatggtcctgcttgcttcgggtggcatcggaatgccggcgctgcaagcaatgttgtccaggcaggtggatgaggaacgtcaggggcagctgcaaggctcactggcggcgctcaccagcctgacctcgatcgtcggacccctcctcttcacggcgatctatgcggcttctataacaacgtggaacgggtgggcatggattgcaggcgctgccctctacttgctctgcctgccggcgctgcgtcgcgggctttggagcggcgcagggcaacgagccgatcgctgatcgtggaaacgataggcctatgccatgcgggtcaaggcgacttccggcaagctatacgcgccctaggagtgcggttggaacgttggcccagccagatactcccgatcacgagcaggacgccgatgatttgaagcgcactcagcgtctgatccaagaacaaccatcctagcaacacggcggtccccgggctgagaaagcccagtaaggaaacaactgtaggttcgagtcgcgagatcccccggaaccaaaggaagtaggttaaacccgctccgatcaggccgagccacgccaggccgagaacattggttcctgtaggcatcgggattggcggatcaaacactaaagctactggaacgagcagaagtcctccggccgccagttgccaggcggtaaaggtgagcagaggcacgggaggttgccacttgcgggtcagcacggttccgaacgccatggaaaccgcccccgccaggcccgctgcgacgccgacaggatctagcgctgcgtttggtgtcaacaccaacagcgccacgcccgcagttccgcaaatagcccccaggaccgccatcaatcgtatcgggctacctagcagagcggcagagatgaacacgaccatcagcggctgcacagcgcctaccgtcgccgcgaccccgcccggcaggcggtagaccgaaataaacaacaagctccagaatagcgaaatattaagtgcgccgaggatgaagatgcgcatccaccagattcccgttggaatctgtcggacgatcatcacgagcaataaacccgccggcaacgcccgcagcagcataccggcgacccctcggcctcgctgttcgggctccacgaaaacgccggacagatgcgccttgtgagcgtccttggggccgtcctcctgtttgaagaccgacagcccaatgatctcgccgtcgatgtaggcgccgaatgccacggcatctcgcaaccgttcagcgaacgcctccatgggctttttctcctcgtgctcgtaaacggacccgaacatctctggagctttcttcagggccgacaatcggatctcgcggaaatcctgcacgtcggccgctccaagccgtcgaatctgagccttaatcacaattgtcaattttaatcctctgtttatcggcagttcgtagagcgcgccgtgcgtcccgagcgatactgagcgaagcaagtgcgtcgagcagtgcccgcttgttcctgaaatgccagtaaagcgctggctgctgaacccccagccggaactgaccccacaaggccctagcgtttgcaatgcaccaggtcatcattgacccaggcgtgttccaccaggccgctgcctcgcaactcttcgcaggcttcgccgacctgctcgcgccacttcttcacgcgggtggaatccgatccgcacatgaggcggaaggtttccagcttgagcgggtacggctcccggtgcgagctgaaatagtcgaacatccgtcgggccgtcggcgacagcttgcggtacttctcccatatgaatttcgtgtagtggtcgccagcaaacagcacgacgatttcctcgtcgatcaggacctggcaacgggacgttttcttgccacggtccaggacgcggaagcggtgcagcagcgacaccgattccaggtgcccaacgcggtcggacgtgaagcccatcgccgtcgcctgtaggcgcgacaggcattcctcggccttcgtgtaataccggccattgatcgaccagcccaggtcctggcaaagctcgtagaacgtgaaggtgatcggctcgccgataggggtgcgcttcgcgtactccaacacctgctgccacaccagttcgtcatcgtcggcccgcagctcgacgccggtgtaggtgatcttcacgtccttgttgacgtggaaaatgaccttgttttgcagcgcctcgcgcgggattttcttgttgcgcgtggtgaacagggcagagcgggccgtgtcgtttggcatcgctcgcatcgtgtccggccacggcgcaatatcgaacaaggaaagctgcatttccttgatctgctgcttcgtgtgtttcagcaacgcggcctgcttggcctcgctgacctgttttgccaggtcctcgccggcggtttttcgcttcttggtcgtcatagttcctcgcgtgtcgatggtcatcgacttcgccaaacctgccgcctcctgttcgagacgacgcgaacgctccacggcggccgatggcgcgggcagggcagggggagccagttgcacgctgtcgcgctcgatcttggccgtagcttgctggaccatcgagccgacggactggaaggtttcgcggggcgcacgcatgacggtgcggcttgcgatggtttcggcatcctcggcggaaaaccccgcgtcgatcagttcttgcctgtatgccttccggtcaaacgtccgattcattcaccctccttgcgggattgccccgactcacgccggggcaatgtgcccttattcctgatttgacccgcctggtgccttggtgtccagataatccaccttatcggcaatgaagtcggtcccgtagaccgtctggccgtccttctcgtacttggtattccgaatcttgccctgcacgaataccagcgaccccttgcccaaatacttgccgtgggcctcggcctgagagccaaaacacttgatgcggaagaagtcggtgcgctcctgcttgtcgccggcatcgttgcgccactcttcattaaccgctatatcgaaaattgcttgcggcttgttagaattgccatgacgtacctcggtgtcacgggtaagattaccgataaactggaactgattatggctcatatcgaaagtctccttgagaaaggagactctagtttagctaaacattggttccgctgtcaagaactttagcggctaaaattttgcgggccgcgaccaaaggtgcgaggggcggcttccgctgtgtacaaccagatatttttcaccaacatccttcgtctgctcgatgagcggggcatgacgaaacatgagctgtcggagagggcaggggtttcaatttcgtttttatcagacttaaccaacggtaaggccaacccctcgttgaaggtgatggaggccattgccgacgccctggaaactcccctacctcttctcctggagtccaccgaccttgaccgcgaggcactcgcggagattgcgggtcatcctttcaagagcagcgtgccgcccggatacgaacgcatcagtgtggttttgccgtcacataaggcgtttatcgtaaagaaatggggcgacgacacccgaaaaaagctgcgtggaaggctctgacgccaagggttagggcttgcacttccttctttagccgctaaaacggccccttctctgcgggccgtcggctcgcgcatcatatcgacatcctcaacggaagccgtgccgcgaatggcatcgggcgggtgcgctttgacagttgttttctatcagaacccctacgtcgtgcggttcgattagctgtttgtcttgcaggctaaacactttcggtatatcgtttgcctgtgcgataatgttgctaatgatttgttgcgtaggggttactgaaaagtgagcgggaaagaagagtttcagaccatcaaggagcgggccaagcgcaagctggaacgcgacatgggtgcggacctgttggccgcgctcaacgacccgaaaaccgttgaagtcatgctcaacgcggacggcaaggtgtggcacgaacgccttggcgagccgatgcggtacatctgcgacatgcggcccagccagtcgcaggcgattatagaaacggtggccggattccacggcaaagaggtcacgcggcattcgcccatcctggaaggcgagttccccttggatggcagccgctttgccggccaattgccgccggtcgtggccgcgccaacctttgcgatccgcaagcgcgcggtcgccatcttcacgctggaacagtacgtcgaggcgggcatcatgacccgcgagcaatacgaggtcattaaaagcgccgtcgcggcgcatcgaaacatcctcgtcattggcggtactggctcgggcaagaccacgctcgtcaacgcgatcatcaatgaaatggtcgccttcaacccgtctgagcgcgtcgtcatcatcgaggacaccggcgaaatccagtgcgccgcagagaacgccgtccaataccacaccagcatcgacgtctcgatgacgctgctgctcaagacaacgctgcgtatgcgccccgaccgcatcctggtcggtgaggtacgtggccccgaagcccttgatctgttgatggcctggaacaccgggcatgaaggaggtgccgccaccctgcacgcaaacaaccccaaagcgggcctgagccggctcgccatgcttatcagcatgcacccggattcaccgaaacccattgagccgctgattggcgaggcggttcatgtggtcgtccatatcgccaggacccctagcggccgtcgagtgcaagaaattctcgaagttcttggttacgagaacggccagtacatcaccaaaaccctgtaaggagtatttccaatgacaacggctgttccgttccgtctgaccatgaatcgcggcattttgttctaccttgccgtgttcttcgttctcgctctcgcgttatccgcgcatccggcgatggcctcggaaggcaccggcggcagcttgccatatgagagctggctgacgaacctgcgcaactccgtaaccggcccggtggccttcgcgctgtccatcatcggcatcgtcgtcgccggcggcgtgctgatcttcggcggcgaactcaacgccttcttccgaaccctgatcttcctggttctggtgatggcgctgctggtcggcgcgcagaacgtgatgagcaccttcttcggtcgtggtgccgaaatcgcggccctcggcaacggggcgctgcaccaggtgcaagtcgcggcggcggatgccgtgcgtgcggtagcggctggacggctcgcctaatcatggctctgcgcacgatccccatccgtcgcgcaggcaaccgagaaaacctgttcatgggtggtgatcgtgaactggtgatgttctcgggcctgatggcgtttgcgctgattttcagcgcccaagagctgcgggccaccgtggtcggtctgatcctgtggttcggggcgctctatgcgttccgaatcatggcgaaggccgatccgaagatgcggttcgtgtacctgcgtcaccgccggtacaagccgtattacccggcccgctcgaccccgttccgcgagaacaccaatagccaagggaagcaataccgatgatccaagcaattgcgattgcaatcgcgggcctcggcgcgcttctgttgttcatcctctttgcccgcatccgcgcggtcgatgccgaactgaaactgaaaaagcatcgttccaaggacgccggcctggccgatctgctcaactacgccgctgtcgtcgatgacggcgtaatcgtgggcaagaacggcagctttatggctgcctggctgtacaagggcgatgacaacgcaagcagcaccgaccagcagcgcgaagtagtgtccgcccgcatcaaccaggccctcgcgggcctgggaagtgggtggatgatccatgtggacgccgtgcggcgtcctgctccgaactacgcggagcggggcctgtcggcgttccctgaccgtctgacggcagcgattgaagaagagcgctcggtcttgccttgctcgtcggtgatgtacttcaccagctccgcgaagtcgctcttcttgatggagcgcatggggacgtgcttggcaatcacgcgcaccccccggccgttttagcggctaaaaaagtcatggctctgccctcgggcggaccacgcccatcatgaccttgccaagctcgtcctgcttctcttcgatcttcgccagcagggcgaggatcgtggcatcaccgaaccgcgccgtgcgcgggtcgtcggtgagccagagtttcagcaggccgcccaggcggcccaggtcgccattgatgcgggccagctcgcggacgtgctcatagtccacgacgcccgtgattttgtagccctggccgacggccagcaggtaggccgacaggctcatgccggccgccgccgccttttcctcaatcgctcttcgttcgtctggaaggcagtacaccttgataggtgggctgcccttcctggttggcttggtttcatcagccatccgcttgccctcatctgttacgccggcggtagccggccagcctcgcagagcaggattcccgttgagcaccgccaggtgcgaataagggacagtgaagaaggaacacccgctcgcgggtgggcctacttcacctatcctgcccggctgacgccgttggatacaccaaggaaagtctacacgaaccctttggcaaaatcctgtatatcgtgcgaaaaaggatggatataccgaaaaaatcgctataatgaccccgaagcagggttatgcagcggaaaagcgctgcttccctgctgttttgtggaatatctaccgactggaaacaggcaaatgcaggaaattactgaactgaggggacaggcgagagacgatgccaaagagctacaccgacgagctggccgagtgggttgaatcccgcgcggccaagaagcgccggcgtgatgaggctgcggttgcgttcctggcggtgagggcggatgtcgaggcggcgttagcgtccggctatgcgctcgtcaccatttgggagcacatgcgggaaacggggaaggtcaagttctcctacgagacgttccgctcgcacgccaggcggcacatcaaggccaagcccgccgatgtgcccgcaccgcaggccaaggctgcggaacccgcgccggcacccaagacgccggagccacggcggccgaagcaggggggcaaggctgaaaagccggcccccgctgcggccccgaccggcttcaccttcaacccaacaccggacaaaaaggatctactgtaatggcgaaaattcacatggttttgcagggcaagggcggggtcggcaagtcggccatcgccgcgatcattgcgcagtacaagatggacaaggggcagacacccttgtgcatcgacaccgacccggtgaacgcgacgttcgagggctacaaggccctgaacgtccgccggctgaacatcatggccggcgacgaaattaactcgcgcaacttcgacaccctggtcgagctgattgcgccgaccaaggatgacgtggtgatcgacaacggtgccagctcgttcgtgcctctgtcgcattacctcatcagcaaccaggtgccggctctgctgcaagaaatggggcatgagctggtcatccataccgtcgtcaccggcggccaggctctcctggacacggtgagcggcttcgcccagctcgccagccagttcccggccgaagcgcttttcgtggtctggctgaacccgtattgggggcctatcgagcatgagggcaagagctttgagcagatgaaggcgtacacggccaacaaggcccgcgtgtcgtccatcatccagattccggccctcaaggaagaaacctacggccgcgatttcagcgacatgctgcaagagcggctgacgttcgaccaggcgctggccgatgaatcgctcacgatcatgacgcggcaacgcctcaagatcgtgcggcgcggcctgtttgaacagctcgacgcggcggccgtgctatgagcgaccagattgaagagctgatccgggagattgcggccaagcacggcatcgccgtcggccgcgacgacccggtgctgatcctgcataccatcaacgcccggctcatggccgacagtgcggccaagcaagaggaaatccttgccgcgttcaaggaagagctggaagggatcgcccatcgttggggcgaggacgccaaggccaaagcggagcggatgctgaacgcggccctggcggccagcaaggacgcaatggcgaaggtaatgaaggacagcgccgcgcaggcggccgaagcgatccgcagggaaatcgacgacggccttggccgccagctcgcggccaaggtcgcggacgcgcggcgcgtggcgatgatgaacatgatcgccggcggcatggtgttgttcgcggccgccctggtggtgtgggcctcgttatgaatcgcagaggcgcagatgaaaaagcccggcgttgccgggctttgtttttgcgttagctgggcttgtttgacaggcccaagctctgactgcgcccgcgctcgcgctcctgggcctgtttcttctcctgctcctgcttgcgcatcagggcctggtgccgtcgggctgcttcacgcatcgaatcccagtcgccggccagctcgggatgctccgcgcgcatcttgcgcgtcgccagttcctcgatcttgggcgcgtgaatgcccatgccttccttgatttcgcgcaccatgtccagccgcgtgtgcagggtctgcaagcgggcttgctgttgggcctgctgctgctgccaggcggcctttgtacgcggcagggacagcaagccgggggcattggactgtagctgctgcaaacgcgcctgctgacggtctacgagctgttctaggcggtcctcgatgcgctccacctggtcatgctttgcctgcacgtagagcgcaagggtctgctggtaggtctgctcgatgggcgcggattctaagagggcctgctgttccgtctcggcctcctgggccgcctgtagcaaatcctcgccgctgttgccgctggactgctttactgccggggactgctgttgccctgctcgcgccgtcgtcgcagttcggcttgcccccactcgattgactgcttcatttcgagccgcagcgatgcgatctcggattgcgtcaacggacggggcagcgcggaggtgtccggcttctccttgggtgagtcggtcgatgccatagccaaaggtttccttccaaaatgcgtccattgctggaccgtgtttctcattgatgcccgcaagcatcttcggcttgaccgccaggtcaagcgcgccttcatgggcggtcatgacggacgccgccatgaccttgccgccgttgttctcgatgtagccgcgtaatgaggcaatggtgccgcccatcgtcagcgtgtcatcgacaacgatgtacttctggccggggatcacctccccctcgaaagtcgggttgaacgccaggcgatgatctgaaccggctccggttcgggcgaccttctcccgctgcacaatgtccgtttcgacctcaaggccaaggcggtcggccagaacgaccgccatcatggccggaatcttgttgttccccgccgcctcgacggcgaggactggaacgatgcggggcttgtcgtcgccgatcagcgtcttgagctgggcaacagtgtcgtccgaaatcaggcgctcgaccaaattaagcgccgcttccgcgtcgccctgcttcgcagcctggtattcaggctcgttggtcaaagaaccaaggtcgccgttgcgaaccaccttcgggaagtctccccacggtgcgcgctcggctctgctgtagctgctcaagacgcctccctttttagccgctaaaactctaacgagtgcgcccgcgactcaacttgacgctttcggcacttacctgtgccttgccacttgcgtcataggtgatgcttttcgcactcccgatttcaggtactttatcgaaatctgaccgggcgtgcattacaaagttcttccccacctgttggtaaatgctgccgctatctgcgtggacgatgctgccgtcgtggcgctgcgacttatcggccttttgggccatatagatgttgtaaatgccaggtttcagggccccggctttatctaccttctggttcgtccatgcgccttggttctcggtctggacaattctttgcccattcatgaccaggaggcggtgtttcattgggtgactcctgacggttgcctctggtgttaaacgtgtcctggtcgcttgccggctaaaaaaaagccgacctcggcagttcgaggccggctttccctagagccgggcgcgtcaaggttgttccatctattttagtgaactgcgttcgatttatcagttactttcctcccgctttgtgtttcctcccactcgtttccgcgtctagccgacccctcaacatagcggcctcttcttgggctgcctttgcctcttgccgcgcttcgtcacgctcggcttgcaccgtcgtaaagcgctcggcctgcctggccgcctcttgcgccgccaacttcctttgctcctggtgggcctcggcgtcggcctgcgccttcgctttcaccgctgccaactccgtgcgcaaactctccgcttcgcgcctggtggcgtcgcgctcgccgcgaagcgcctgcatttcctggttggccgcgtccagggtcttgcggctctcttctttgaatgcgcgggcgtcctggtgagcgtagtccagctcggcgcgcagctcctgcgctcgacgctccacctcgtcggcccgctgcgtcgccagcgcggcccgctgctcggctcctgccagggcggtgcgtgcttcggccagggcttgccgctggcgtgcggccagctcggccgcctcggcggcctgctgctctagcaatgtaacgcgcgcctgggcttcttccagctcgcgggcctgcgcctcgaaggcgtcggccagctccccgcgcacggcttccaactcgttgcgctcacgatcccagccggcttgcgctgcctgcaacgattcattggcaagggcctgggcggcttgccagagggcggccacggcctggttgccggcctgctgcaccgcgtccggcacctggactgccagcggggcggcctgcgccgtgcgctggcgtcgccattcgcgcatgccggcgctggcgtcgttcatgttgacgcgggcggccttacgcactgcatccacggtcgggaagttctcccggtcgccttgctcgaacagctcgtccgcagccgcaaaaatgcggtcgcgcgtctctttgttcagttccatgttggctccggtaattggtaagaataataatactcttacctaccttatcagcgcaagagtttagctgaacagttctcgacttaacggcaggttttttagcggctgaagggcaggcaaaaaaagccccgcacggtcggcgggggcaaagggtcagcgggaaggggattagcgggcgtcgggcttcttcatgcgtcggggccgcgcttcttgggatggagcacgacgaagcgcgcacgcgcatcgtcctcggccctatcggcccgcgtcgcggtcaggaacttgtcgcgcgctaggtcctccctggtgggcaccaggggcatgaactcggcctgctcgatgtaggtccactccatgaccgcatcgcagtcgaggccgcgttccttcaccgtctcttgcaggtcgcggtacgcccgctcgttgagcggctggtaacgggccaattggtcgtaaatggctgtcggccatgagcggcctttcctgttgagccagcagccgacgacgaagccggcaatgcaggcccctggcacaaccaggccgacgccgggggcaggggatggcagcagctcgccaaccaggaaccccgccgcgatgatgccgatgccggtcaaccagcccttgaaactatccggccccgaaacacccctgcgcattgcctggatgctgcgccggatagcttgcaacatcaggagccgtttcttttgttcgtcagtcatggtccgccctcaccagttgttcgtatcggtgtcggacgaactgaaatcgcaagagctgccggtatcggtccagccgctgtccgtgtcgctgctgccgaagcacggcgaggggtccgcgaacgccgcagacggcgtatccggccgcagcgcatcgcccagcatggccccggtcagcgagccgccggccaggtagcccagcatggtgctgttggtcgccccggccaccagggccgacgtgacgaaatcgccgtcattccctctggattgttcgctgctcggcggggcagtgcgccgcgccggcggcgtcgtggatggctcgggttggctggcctgcgacggccggcgaaaggtgcgcagcagctcgttatcgaccggctgcggcgtcggggccgccgccttgcgctgcggtcggtgttccttcttcggctcgcgcagcttgaacagcatgatcgcggaaaccagcagcaacgccgcgcctacgcctcccgcgatgtagaacagcatcggattcattcttcggtcctccttgtagcggaaccgttgtctgtgcggcgcgggtggcccgcgccgctgtctttggggatcagccctcgatgagcgcgaccagtttcacgtcggcaaggttcgcctcgaactcctggccgtcgtcctcgtacttcaaccaggcatagccttccgccggcggccgacggttgaggataaggcgggcagggcgctcgtcgtgctcgacctggacgatggcctttttcagcttgtccgggtccggctccttcgcgcccttttccttggcgtccttaccgtcctggtcgccgtcctcgccgtcctggccgtcgccggcctccgcgtcacgctcggcatcagtctggccgttgaaggcatcgacggtgttgggatcgcggcccttctcgtccaggaactcgcgcagcagcttgaccgtgccgcgcgtgatttcctgggtgtcgtcgtcaagccacgcctcgacttcctccgggcgcttcttgaaggccgtcaccagctcgttcaccacggtcacgtcgcgcacgcggccggtgttgaacgcatcggcgatcttctccggcaggtccagcagcgtgacgtgctgggtgatgaacgccggcgacttgccgatttccttggcgatatcgcctttcttcttgcccttcgccagctcgcggccaatgaagtcggcaatttcgcgcggggtcagctcgttgcgttgcaggttctcgataacctggtcggcttcgttgtagtcgttgtcgatgaacgccgggatggacttcttgccggcccacttcgagccacggtagcggcgggcgccgtgattgatgatatagcggcccggctgctcctggttctcgcgcaccgaaatgggtgacttcaccccgcgctctttgatcgtggcaccgatttccgcgatgctctccggggaaaagccggggttgtcggccgtccgcggctgatgcggatcttcgtcgatcaggtccaggtccagctcgatagggccggaaccgccctgagacgccgcaggagcgtccaggaggctcgacaggtcgccgatgctatccaaccccaggccggacggctgcgccgcgcctgcggcttcctgagcggccgcagcggtgtttttcttggtggtcttggcttgagccgcagtcattgggaaatctccatcttcgtgaacacgtaatcagccagggcgcgaacctctttcgatgccttgcgcgcggccgttttcttgatcttccagaccggcacaccggatgcgagggcatcggcgatgctgctgcgcaggccaacggtggccggaatcatcatcttggggtacgcggccagcagctcggcttggtggcgcgcgtggcgcggattccgcgcatcgaccttgctgggcaccatgccaaggaattgcagcttggcgttcttctggcgcacgttcgcaatggtcgtgaccatcttcttgatgccctggatgctgtacgcctcaagctcgatgggggacagcacatagtcggccgcgaagagggcggccgccaggccgacgccaagggtcggggccgtgtcgatcaggcacacgtcgaagccttggttcgccagggccttgatgttcgccccgaacagctcgcgggcgtcgtccagcgacagccgttcggcgttcgccagtaccgggttggactcgatgagggcgaggcgcgcggcctggccgtcgccggctgcgggtgcggtttcggtccagccgccggcagggacagcgccgaacagcttgcttgcatgcaggccggtagcaaagtccttgagcgtgtaggacgcattgccctgggggtccaggtcgatcacggcaacccgcaagccgcgctcgaaaaagtcgaaggcaagatgcacaagggtcgaagtcttgccgacgccgcctttctggttggccgtgaccaaagttttcatcgtttggtttcctgttttttcttggcgtccgcttcccacttccggacgatgtacgcctgatgttccggcagaaccgccgttacccgcgcgtacccctcgggcaagttcttgtcctcgaacgcggcccacacgcgatgcaccgcttgcgacactgcgcccctggtcagtcccagcgacgttgcgaacgtcgcctgtggcttcccatcgactaagacgccccgcgctatctcgatggtctgctgccccacttccagcccctggatcgcctcctggaactggctttcggtaagccgtttcttcatggataacacccataatttgctccgcgccttggttgaacatagcggtgacagccgccagcacatgagagaagtttagctaaacatttctcgcacgtcaacacctttagccgctaaaactcgtccttggcgtaacaaaacaaaagcccggaaaccgggctttcgtctcttgccgcttatggctctgcacccggctccatcaccaacaggtcgcgcacgcgcttcactcggttgcggatcgacactgccagcccaacaaagccggttgccgccgccgccaggatcgcgccgatgatgccggccacaccggccatcgcccaccaggtcgccgccttccggttccattcctgctggtactgcttcgcaatgctggacctcggctcaccataggctgaccgctcgatggcgtatgccgcttctccccttggcgtaaaacccagcgccgcaggcggcattgccatgctgcccgccgctttcccgaccacgacgcgcgcaccaggcttgcggtccagaccttcggccacggcgagctgcgcaaggacataatcagccgccgacttggctccacgcgcctcgatcagctcttgcactcgcgcgaaatccttggcctccacggccgccatgaatcgcgcacgcggcgaaggctccgcagggccggcgtcgtgatcgccgccgagaatgcccttcaccaagttcgacgacacgaaaatcatgctgacggctatcaccatcatgcagacggatcgcacgaacccgctgaattgaacacgagcacggcacccgcgaccactatgccaagaatgcccaaggtaaaaattgccggccccgccatgaagtccgtgaatgccccgacggccgaagtgaagggcaggccgccacccaggccgccgccctcactgcccggcacctggtcgctgaatgtcgatgccagcacctgcggcacgtcaatgcttccgggcgtcgcgctcgggctgatcgcccatcccgttactgccccgatcccggcaatggcaaggactgccagcgctgccatttttggggtgaggccgttcgcggccgaggggcgcagcccctggggggatgggaggcccgcgttagcgggccgggagggttcgagaagggggggcaccccccttcggcgtgcgcggtcacgcgcacagggcgcagccctggttaaaaacaaggtttataaatattggtttaaaagcaggttaaaagacaggttagcggtggccgaaaaacgggcggaaacccttgcaaatgctggattttctgcctgtggacagcccctcaaatgtcaataggtgcgcccctcatctgtcagcactctgcccctcaagtgtcaaggatcgcgcccctcatctgtcagtagtcgcgcccctcaagtgtcaataccgcagggcacttatccccaggcttgtccacatcatctgtgggaaactcgcgtaaaatcaggcgttttcgccgatttgcgaggctggccagctccacgtcgccggccgaaatcgagcctgcccctcatctgtcaacgccgcgccgggtgagtcggcccctcaagtgtcaacgtccgcccctcatctgtcagtgagggccaagttttccgcgaggtatccacaacgccggcggccgcggtgtctcgcacacggcttcgacggcgtttctggcgcgtttgcagggccatagacggccgccagcccagcggcgagggcaaccagcccggtgagcgtcggaaaggcgctggaagccccgtagcgacgcggagaggggcgagacaagccaagggcgcaggctcgatgcgcagcacgacatagccggttctcgcaaggacgagaatttccctgcggtgcccctcaagtgtcaatgaaagtttccaacgcgagccattcgcgagagccttgagtccacgctagatgagagctttgttgtaggtggaccagttggtgattttgaacttttgctttgccacggaacggtctgcgttgtcgggaagatgcgtgatctgatccttcaactcagcaaaagttcgatttattcaacaaagccacgttgtgtctcaaaatctctgatgttacattgcacaagataaaaatatatcatcatgaacaataaaactgtctgcttacataaacagtaatacaaggggtgttatgagccatattcaacgggaaacgtcttgctcgactctagagctcgttcctcgaggcctcgaggcctcgaggaacggtacctgcggggaagcttacaataatgtgtgttgttaagtcttgttgcctgtcatcgtctgactgactttcgtcataaatcccggcctccgtaacccagctttgggcaagctcacggatttgatccggcggaacgggaatatcgagatgccgggctgaacgctgcagttccagctttccctttcgggacaggtactccagctgattgattatctgctgaagggtcttggttccacctcctggcacaatgcgaatgattacttgagcgcgatcgggcatccaattttctcccgtcaggtgcgtggtcaagtgctacaaggcacctttcagtaacgagcgaccgtcgatccgtcgccgggatacggacaaaatggagcgcagtagtccatcgagggcggcgaaagcctcgccaaaagcaatacgttcatctcgcacagcctccagatccgatcgagggtcttcggcgtaggcagatagaagcatggatacattgcttgagagtattccgatggactgaagtatggcttccatcttttctcgtgtgtctgcatctatttcgagaaagcccccgatgcggcgcaccgcaacgcgaattgccatactatccgaaagtcccagcaggcgcgcttgataggaaaaggtttcatactcggccgatcgcagacgggcactcacgaccttgaacccttcaactttcagggatcgatgctggttgatggtagtctcactcgacgtggctctggtgtgttttgacatagcttcctccaaagaaagcggaaggtctggatactccagcacgaaatgtgcccgggtagacggatggaagtctagccctgctcaatatgaaatcaacagtacatttacagtcaatactgaatatacttgctacatttgcaattgtcttataacgaatgtgaaataaaaatagtgtaacaacgcttttactcatcgataatcacaaaaacatttatacgaacaaaaatacaaatgcactccggtttcacaggataggcgggatcagaatatgcaacttttgacgttttgttctttcaaagggggtgctggcaaaaccaccgcactcatgggcctttgcgctgctttggcaaatgacggtaaacgagtggccctctttgatgccgacgaaaaccggcctctgacgcgatggagagaaaacgccttacaaagcagtactgggatcctcgctgtgaagtctattccgccgacgaaatgccccttcttgaagcagcctatgaaaatgccgagctcgaaggatttgattatgcgttggccgatacgcgtggcggctcgagcgagctcaacaacacaatcatcgctagctcaaacctgcttctgatccccaccatgctaacgccgctcgacatcgatgaggcactatctacctaccgctacgtcatcgagctgctgttgagtgaaaatttggcaattcctacagctgttttgcgccaacgcgtcccggtcggccgattgacaacatcgcaacgcaggatgtcagagacgctagagagccttccagttgtaccgtctcccatgcatgaaagagatgcatttgccgcgatgaaagaacgcggcatgttgcatcttacattactaaacacgggaactgatccgacgatgcgcctcatagagaggaatcttcggattgcgatggaggaagtcgtggtcatttcgaaactgatcagcaaaatcttggaggcttgaagatggcaattcgcaagcccgcattgtcggtcggcgaagcacggcggcttgctggtgctcgacccgagatccaccatcccaacccgacacttgttccccagaagctggacctccagcacttgcctgaaaaagccgacgagaaagaccagcaacgtgagcctctcgtcgccgatcacatttacagtcccgatcgacaacttaagctaactgtggatgcccttagtccacctccgtccccgaaaaagctccaggtttttctttcagcgcgaccgcccgcgcctcaagtgtcgaaaacatatgacaacctcgttcggcaatacagtccctcgaagtcgctacaaatgattttaaggcgcgcgttggacgatttcgaaagcatgctggcagatggatcatttcgcgtggccccgaaaagttatccgatcccttcaactacagaaaaatccgttctcgttcagacctcacgcatgttcccggttgcgttgctcgaggtcgctcgaagtcattttgatccgttggggttggagaccgctcgagctttcggccacaagctggctaccgccgcgctcgcgtcattctttgctggagagaagccatcgagcaattggtgaagagggacctatcggaacccctcaccaaatattgagtgtaggtttgaggccgctggccgcgtcctcagtcaccttttgagccagataattaagagccaaatgcaattggctcaggctgccatcgtccccccgtgcgaaacctgcacgtccgcgtcaaagaaataaccggcacctcttgctgtttttatcagttgagggcttgacggatccgcctcaagtttgcggcgcagccgcaaaatgagaacatctatactcctgtcgtaaacctcctcgtcgcgtactcgactggcaatgagaagttgctcgcgcgatagaacgtcgcggggtttctctaaaaacgcgaggagaagattgaactcacctgccgtaagtttcacctcaccgccagcttcggacatcaagcgacgttgcctgagattaagtgtccagtcagtaaaacaaaaagaccgtcggtctttggagcggacaacgttggggcgcacgcgcaaggcaacccgaatgcgtgcaagaaactctctcgtactaaacggcttagcgataaaatcacttgctcctagctcgagtgcaacaactttatccgtctcctcaaggcggtcgccactgataattatgattggaatatcagactttgccgccagatttcgaacgatctcaagcccatcttcacgacctaaatttagatcaacaaccacgacatcgaccgtcgcggaagagagtactctagtgaactgggtgctgtcggctaccgcggtcactttgaaggcgtggatcgtaaggtattcgataataagatgccgcatagcgacatcgtcatcgataagaagaacgtgtttcaacggctcacctttcaatctaaaatctgaacccttgttcacagcgcttgagaaattttcacgtgaaggatgtacaatcatctccagctaaatgggcagttcgtcagaattgcggctgaccgcggatgacgaaaatgcgaaccaagtatttcaattttatgacaaaagttctcaatcgttgttacaagtgaaacgcttcgaggttacagctactattgattaaggagatcgcctatggtctcgccccggcgtcgtgcgtccgccgcgagccagatctcgcctacttcataaacgtcctcataggcacggaatggaatgatgacatcgatcgccgtagagagcatgtcaatcagtgtgcgatcttccaagctagcaccttgggcgctacttttgacaagggaaaacagtttcttgaatccttggattggattcgcgccgtgtattgttgaaatcgatcccggatgtcccgagacgacttcactcagataagcccatgctgcatcgtcgcgcatctcgccaagcaatatccggtccggccgcatacgcagacttgcttggagcaagtgctcggcgctcacagcacccagcccagcaccgttcttggagtagagtagtctaacatgattatcgtgtggaatgacgagttcgagcgtatcttctatggtgattagcctttcctggggggggatggcgctgatcaaggtcttgctcattgttgtcttgccgcttccggtagggccacatagcaacatcgtcagtcggctgacgacgcatgcgtgcagaaacgcttccaaatccccgttgtcaaaatgctgaaggatagcttcatcatcctgattttggcgtttccttcgtgtctgccactggttccacctcgaagcatcataacgggaggagacttctttaagaccagaaacacgcgagcttggccgtcgaatggtcaagctgacggtgcccgagggaacggtcggcggcagacagatttgtagtcgttcaccaccaggaagttcagtggcgcagagggggttacgtggtccgacatcctgctttctcagcgcgcccgctaaaatagcgatatcttcaagatcatcataagagacgggcaaaggcatcttggtaaaaatgccggcttggcgcacaaatgcctctccaggtcgattgatcgcaatttcttcagtcttcgggtcatcgagccattccaaaatcggcttcagaagaaagcgtagttgcggatccacttccatttacaatgtatcctatctctaagcggaaatttgaattcattaagagcggcggttcctcccccgcgtggcgccgccagtcaggcggagctggtaaacaccaaagaaatcgaggtcccgtgctacgaaaatggaaacggtgtcaccctgattcttcttcagggttggcggtatgttgatggttgccttaagggctgtctcagttgtctgctcaccgttattttgaaagctgttgaagctcatcccgccacccgagctgccggcgtaggtgctagctgcctggaaggcgccttgaacaacactcaagagcatagctccgctaaaacgctgccagaagtggctgtcgaccgagcccggcaatcctgagcgaccgagttcgtccgcgcttggcgatgttaacgagatcatcgcatggtcaggtgtctcggcgcgatcccacaacacaaaaacgcgcccatctccctgttgcaagccacgctgtatttcgccaacaacggtggtgccacgatcaagaagcacgatattgttcgttgttccacgaatatcctgaggcaagacacactttacatagcctgccaaatttgtgtcgattgcggtttgcaagatgcacggaattattgtcccttgcgttaccataaaatcggggtgcggcaagagcgtggcgctgctgggctgcagctcggtgggtttcatacgtatcgacaaatcgttctcgccggacacttcgccattcggcaaggagttgtcgtcacgcttgccttcttgtcttcggcccgtgtcgccctgaatggcgcgtttgctgaccccttgatcgccgctgctatatgcaaaaatcggtgtttcttccggccgtggctcatgccgctccggttcgcccctcggcggtagaggagcagcaggctgaacagcctcttgaaccgctggaggatccggcggcacctcaatcggagctggatgaaatggcttggtgtttgttgcgatcaaagttgacggcgatgcgttctcattcaccttcttttggcgcccacctagccaaatgaggcttaatgataacgcgagaacgacacctccgacgatcaatttctgagaccccgaaagacgccggcgatgtttgtcggagaccagggatccagatgcatcaacctcatgtgccgcttgctgactatcgttattcatcccttcgcccccttcaggacgcgtttcacatcgggcctcaccgtgcccgtttgcggcctttggccaacgggatcgtaagcggtgttccagatacatagtactgtgtggccatccctcagacgccaacctcgggaaaccgaagaaatctcgacatcgctccctttaactgaatagttggcaacagcttccttgccatcaggattgatggtgtagatggagggtatgcgtacattgcccggaaagtggaataccgtcgtaaatccattgtcgaagacttcgagtggcaacagcgaacgatcgccttgggcgacgtagtgccaattactgtccgccgcaccaagggctgtgacaggctgatccaataaattctcagctttccgttgatattgtgcttccgcgtgtagtctgtccacaacagccttctgttgtgcctcccttcgccgagccgccgcatcgtcggcggggtaggcgaattggacgctgtaatagagatcgggctgctctttatcgaggtgggacagagtcttggaacttatactgaaaacataacggcgcatcccggagtcgcttgcggttagcacgattactggctgaggcgtgaggacctggcttgccttgaaaaatagataatttccccgcggtagggctgctagatctttgctatttgaaacggcaaccgctgtcaccgtttcgttcgtggcgaatgttacgaccaaagtagctccaaccgccgtcgagaggcgcaccacttgatcgggattgtaagccaaataacgcatgcgcggatctagcttgcccgccattggagtgtcttcagcctccgcaccagtcgcagcggcaaataaacatgctaaaatgaaaagtgcttttctgatcatggttcgctgtggcctacgtttgaaacggtatcttccgatgtctgataggaggtgacaaccagacctgccgggttggttagtctcaatctgccgggcaagctggtcaccttttcgtagcgaactgtcgcggtccacgtactcaccacaggcattttgccgtcaacgacgagggtccttttatagcgaatttgctgcgtgcttggagttacatcatttgaagcgatgtgctcgacctccaccctgccgcgtttgccaagaatgacttgaggcgaactgggattgggatagttgaagaattgctggtaatcctggcgcactgttggggcactgaagttcgataccaggtcgtaggcgtactgagcggtgtcggcatcataactctcgcgcaggcgaacgtactcccacaatgaggcgttaacgacggcctcctcttgagttgcaggcaatcgcgagacagacacctcgctgtcaacggtgccgtccggccgtatccatagatatacgggcacaagcctgctcaacggcaccattgtggctatagcgaacgcttgagcaacatttcccaaaatcgcgatagctgcgacagctgcaatgagtttggagagacgtcgcgccgatttcgctcgcgcggtttgaaaggcttctacttccttatagtgctcggcaaggctttcgcgcgccactagcatggcatattcaggccccgtcatagcgtccacccgaattgccgagctgaagatctgacggagtaggctgccatcgccccacattcagcgggaagatcgggcctttgcagctcgctaatgtgtcgtttgtctggcagccgctcaaagcgacaactaggcacagcaggcaatacttcatagaattctccattgaggcgaatttttgcgcgacctagcctcgctcaacctgagcgaagcgacggtacaagctgctggcagattgggttgcgccgctccagtaactgcctccaatgttgccggcgatcgccggcaaagcgacaatgagcgcatcccctgtcagaaaaaacatatcgagttcgtaaagaccaatgatcttggccgcggtcgtaccggcgaaggtgattacaccaagcataagggtgagcgcagtcgcttcggttaggatgacgatcgttgccacgaggtttaagaggagaagcaagagaccgtaggtgataagttgcccgatccacttagctgcgatgtcccgcgtgcgatcaaaaatatatccgacgaggatcagaggcccgatcgcgagaagcactttcgtgagaattccaacggcgtcgtaaactccgaaggcagaccagagcgtgccgtaaaggacccactgtgccccttggaaagcaaggatgtcctggtcgttcatcggaccgatttcggatgcgattttctgaaaaacggcctgggtcacggcgaacattgtatccaactgtgccggaacagtctgcagaggcaagccggttacactaaactgctgaacaaagtttgggaccgtcttttcgaagatggaaaccacatagtcttggtagttagcctgcccaacaattagagcaacaacgatggtgaccgtgatcacccgagtgataccgctacgggtatcgacttcgccgcgtatgactaaaataccctgaacaataatccaaagagtgacacaggcgatcaatggcgcactcaccgcctcctggatagtctcaagcatcgagtccaagcctgtcgtgaaggctacatcgaagatcgtatgaatggccgtaaacggcgccggaatcgtgaaattcatcgattggacctgaacttgactggtttgtcgcataatgttggataaaatgagctcgcattcggcgaggatgcgggcggatgaacaaatcgcccagccttaggggagggcaccaaagatgacagcggtcttttgatgctccttgcgttgagcggccgcctcttccgcctcgtgaaggccggcctgcgcggtagtcatcgttaataggcttgtcgcctgtacattttgaatcattgcgtcatggatctgcttgagaagcaaaccattggtcacggttgcctgcatgatattgcgagatcgggaaagctgagcagacgtatcagcattcgccgtcaagcgtttgtccatcgtttccagattgtcagccgcaatgccagcgctgtttgcggaaccggtgatctgcgatcgcaacaggtccgcttcagcatcactacccacgactgcacgatctgtatcgctggtgatcgcacgtgccgtggtcgacattggcattcgcggcgaaaacatttcattgtctaggtccttcgtcgaaggatactgatttttctggttgagcgaagtcagtagtccagtaacgccgtaggccgacgtcaacatcgtaaccatcgctatagtctgagtgagattctccgcagtcgcgagcgcagtcgcgagcgtctcagcctccgttgccgggtcgctaacaacaaactgcgcccgcgcgggctgaatatatagaaagctgcaggtcaaaactgttgcaataagttgcgtcgtcttcatcgtttcctaccttatcaatcttctgcctcgtggtgacgggccatgaattcgctgagccagccagatgagttgccttcttgtgcctcgcgtagtcgagttgcaaagcgcaccgtgttggcacgccccgaaagcacggcgacatattcacgcatatcccgcagatcaaattcgcagatgacgcttccactttctcgtttaagaagaaacttacggctgccgaccgtcatgtcttcacggatcgcctgaaattccttttcggtacatttcagtccatcgacataagccgatcgatctgcggttggtgatggatagaaaatcttcgtcatacattgcgcaaccaagctggctcctagcggcgattccagaacatgctctggttgctgcgttgccagtattagcatcccgttgttttttcgaacggtcaggaggaatttgtcgacgacagtcgaaaatttagggtttaacaaataggcgcgaaactcatcgcagctcatcacaaaacggcggccgtcgatcatggctccaatccgatgcaggagatatgctgcagcgggagcgcatacttcctcgtattcgagaagatgcgtcatgtcgaagccggtaatcgacggatctaactttacttcgtcaacttcgccgtcaaatgcccagccaagcgcatggccccggcaccagcgttggagccgcgctcctgcgccttcggcgggcccatgcaacaaaaattcacgtaaccccgcgattgaacgcatttgtggatcaaacgagagctgacgatggataccacggaccagacggcggttctcttccggagaaatcccaccccgaccatcactctcgatgagagccacgatccattcgcgcagaaaatcgtgtgaggctgctgtgttttctaggccacgcaacggcgccaacccgctgggtgtgcctctgtgaagtgccaaatatgttcctcctgtggcgcgaaccagcaattcgccaccccggtccttgtcaaagaacacgaccgtacctgcacggtcgaccatgctctgttcgagcatggctagaacaaacatcatgagcgtcgtcttacccctcccgataggcccgaatattgccgtcatgccaacatcgtgctcatgcgggatatagtcgaaaggcgttccgccattggtacgaaatcgggcaatcgcgttgccccagtggcctgagctggcgccctctggaaagttttcgaaagagacaaaccctgcgaaattgcgtgaagtgattgcgccagggcgtgtgcgccacttaaaattccccggcaattgggaccaataggccgcttccataccaataccttcttggacaaccacggcacctgcatccgccattcgtgtccgagcccgcgcgcccctgtccccaagactattgagatcgtctgcatagacgcaaaggctcaaatgatgtgagcccataacgaattcgttgctcgcaagtgcgtcctcagcctcggataatttgccgatttgagtcacggctttatcgccggaactcagcatctggctcgatttgaggctaagtttcgcgtgcgcttgcgggcgagtcaggaacgaaaaactctgcgtgagaacaagtggaaaatcgagggatagcagcgcgttgagcatgcccggccgtgtttttgcagggtattcgcgaaacgaatagatggatccaacgtaactgtcttttggcgttctgatctcgagtcctcgcttgccgcaaatgactctgtcggtataaatcgaagcgccgagtgagccgctgacgaccggaaccggtgtgaaccgaccagtcatgatcaaccgtagcgcttcgccaatttcggtgaagagcacaccctgcttctcgcggatgccaagacgatgcaggccatacgctttaagagagccagcgacaacatgccaaagatcttccatgttcctgatctggcccgtgagatcgttttccctttttccgcttagcttggtgaacctcctctttaccttccctaaagccgcctgtgggtagacaatcaacgtaaggaagtgttcattgcggaggagttggccggagagcacgcgctgttcaaaagcttcgttcaggctagcggcgaaaacactacggaagtgtcgcggcgccgatgatggcacgtcggcatgacgtacgaggtgagcatatattgacacatgatcatcagcgatattgcgcaacagcgtgttgaacgcacgacaacgcgcattgcgcatttcagtttcctcaagctcgaatgcaacgccatcaattctcgcaatggtcatgatcgatccgtcttcaagaaggacgatatggtcgctgaggtggccaatataagggagatagatctcaccggatctttcggtcgttccactcgcgccgagcatcacaccattcctctccctcgtgggggaaccctaattggatttgggctaacagtagcgcccccccaaactgcactatcaatgcttcttcccgcggtccgcaaaaatagcaggacgacgctcgccgcattgtagtctcgctccacgatgagccgggctgcaaaccataacggcacgagaacgacttcgtagagcgggttctgaacgataacgatgacaaagccggcgaacatcatgaataaccctgccaatgtcagtggcaccccaagaaacaatgcgggccgtgtggctgcgaggtaaagggtcgattcttccaaacgatcagccatcaactaccgccagtgagcgtttggccgaggaagctcgccccaaacatgataacaatgccgccgacgacgccggcaaccagcccaagcgaagcccgcccgaacatccaggagatcccgatagcgacaatgccgagaacagcgagtgactggccgaacggaccaaggataaacgtgcatatattgttaaccattgtggcggggtcagtgccgccacccgcagattgcgctgcggcgggtccggatgaggaaatgctccatgcaattgcaccgcacaagcttggggcgcagctcgatatcacgcgcatcatcgcattcgagagcgagaggcgatttagatgtaaacggtatctctcaaagcatcgcatcaatgcgcacctccttagtataagtcgaataagacttgattgtcgtctgcggatttgccgttgtcctggtgtggcggtggcggagcgattaaaccgccagcgccatcctcctgcgagcggcgctgatatgacccccaaacatcccacgtctcttcggattttagcgcctcgtgatcgtcttttggaggctcgattaacgcgggcaccagcgattgagcagctgtttcaacttttcgcacgtagccgtttgcaaaaccgccgatgaaattaccggtgttgtaagcggagatcgcccgacgaagcgcaaattgcttctcgtcaatcgtttcgccgcctgcataacgacttttcagcatgtttgcagcggcagataatgatgtgcacgcctggagcgcaccgtcaggtgtcagaccgagcatagaaaaatttcgagagtttatttgcatgaggccaacatccagcgaatgccgtgcatcgagacggtgcctgacgacttgggttgcttggctgtgatcttgccagtgaagcgtttcgccggtcgtgttgtcatgaatcgctaaaggatcaaagcgactctccaccttagctatcgccgcaagcgtagatgtcgcaactgatggggcacacttgcgagcaacatggtcaaactcagcagatgagagtggcgtggcaaggctcgacgaacagaaggagaccatcaaggcaagagaaagcgaccccgatctcttaagcataccttatctccttagctcgcaactaacaccgcctctcccgttggaagaagtgcgttgttttatgttgaagattatcgggagggtcggttactcgaaaattttcaattgcttctttatgatttcaattgaagcgagaaacctcgcccggcgtcttggaacgcaacatggaccgagaaccgcgcatccatgactaagcaaccggatcgacctattcaggccgcagttggtcaggtcaggctcagaacgaaaatgctcggcgaggttacgctgtctgtaaacccattcgatgaacgggaagcttccttccgattgctcttggcaggaatattggcccatgcctgcttgcgctttgcaaatgctcttatcgcgttggtatcatatgccttgtccgccagcagaaacgcactctaagcgattatttgtaaaaatgtttcggtcatgcggcggtcatgggcttgacccgctgtcagcgcaagacggatcggtcaaccgtcggcatcgacaacagcgtgaatcttggtggtcaaaccgccacgggaacgtcccatacagccatcgtcttgatcccgctgtttcccgtcgccgcatgttggtggacgcggacacaggaactgtcaatcatgacgacattctatcgaaagccttggaaatcacactcagaatatgatcccagacgtctgcctcacgccatcgtacaaagcgattgtagcaggttgtacaggaaccgtatcgatcaggaacgtctgcccagggcgggcccgtccggaagcgccacaagatgacattgatcacccgcgtcaacgcgcggcacgcgacgcggcttatttgggaacaaaggactgaacaacagtccattcgaaatcggtgacatcaaagcggggacgggttatcagtggcctccaagtcaagcctcaatgaatcaaaatcagaccgatttgcaaacctgatttatgagtgtgcggcctaaatgatgaaatcgtccttctagatcgcctccgtggtgtagcaacacctcgcagtatcgccgtgctgaccttggccagggaattgactggcaagggtgctttcacatgaccgctcttttggccgcgatagatgatttcgttgctgctttgggcacgtagaaggagagaagtcatatcggagaaattcctcctggcgcgagagcctgctctatcgcgacggcatcccactgtcgggaacagaccggatcattcacgaggcgaaagtcgtcaacacatgcgttataggcatcttcccttgaaggatgatcttgttgctgccaatctggaggtgcggcagccgcaggcagatgcgatctcagcgcaacttgcggcaaaacatctcactcacctgaaaaccactagcgagtctcgcgatcagacgaaggccttttacttaacgacacaatatccgatgtctgcatcacaggcgtcgctatcccagtcaatactaaagcggtgcaggaactaaagattactgatgacttaggcgtgccacgaggcctgagacgacgcgcgtagacagttttttgaaatcattatcaaagtgatggcctccgctgaagcctatcacctctgcgccggtctgtcggagagatgggcaagcattattacggtcttcgcgcccgtacatgcattggacgattgcagggtcaatggatctgagatcatccagaggattgccgcccttaccttccgtttcgagttggagccagcccctaaatgagacgacatagtcgacttgatgtgacaatgccaagagagagatttgcttaacccgatttttttgctcaagcgtaagcctattgaagcttgccggcatgacgtccgcgccgaaagaatatcctacaagtaaaacattctgcacaccgaaatgcttggtgtagacatcgattatgtgaccaagatccttagcagtttcgcttggggaccgctccgaccagaaataccgaagtgaactgacgccaatgacaggaatcccttccgtctgcagataggtaccatcgatagatctgctgcctcgcgcgtttcggtgatgacggtgaaaacctctgacacatgcagctcccggagacggtcacagcttgtctgtaagcggatgccgggagcagacaagcccgtcagggcgcgtcagcgggtgttggcgggtgtcggggcgcagccatgacccagtcacgtagcgatagcggagtgtatactggcttaactatgcggcatcagagcagattgtactgagagtgcaccatatgcggtgtgaaataccgcacagatgcgtaaggagaaaataccgcatcaggcgctcttccgcttcctcgctcactgactcgctgcgctcggtcgttcggctgcggcgagcggtatcagctcactcaaaggcggtaatacggttatccacagaatcaggggataacgcaggaaagaacatgtgagcaaaaggccagcaaaaggccaggaaccgtaaaaaggccgcgttgctggcgtttttccataggctccgcccccctgacgagcatcacaaaaatcgacgctcaagtcagaggtggcgaaacccgacaggactataaagataccaggcgtttccccctggaagctccctcgtgcgctctcctgttccgaccctgccgcttaccggatacctgtccgcctttctcccttcgggaagcgtggcgctttctcatagctcacgctgtaggtatctcagttcggtgtaggtcgttcgctccaagctgggctgtgtgcacgaaccccccgttcagcccgaccgctgcgccttatccggtaactatcgtcttgagtccaacccggtaagacacgacttatcgccactggcagcagccactggtaacaggattagcagagcgaggtatgtaggcggtgctacagagttcttgaagtggtggcctaactacggctacactagaaggacagtatttggtatctgcgctctgctgaagccagttaccttcggaaaaagagttggtagctcttgatccggcaaacaaaccaccgctggtagcggtggtttttttgtttgcaagcagcagattacgcgcagaaaaaaaggatctcaagaagatcctttgatcttttctacggggtctgacgctcagtggaacgaaaactcacgttaagggattttggtcatgagattatcaaaaaggatcttcacctagatccttttaaattaaaaatgaagttttaaatcaatctaaagtatatatgagtaaacttggtctgacagttaccaatgcttaatcagtgaggcacctatctcagcgatctgtctatttcgttcatccatagttgcctgactccccgtcgtgtagataactacgatacgggagggcttaccatctggccccagtgctgcaatgataccgcgagacccacgctcaccggctccagatttatcagcaataaaccagccagccggaagggccgagcgcagaagtggtcctgcaactttatccgcctccatccagtctattaattgttgccgggaagctagagtaagtagttcgccagttaatagtttgcgcaacgttgttgccattgctgcaggggggggggggggggggttccattgttcattccacggacaaaaacagagaaaggaaacgacagaggccaaaaagctcgctttcagcacctgtcgtttcctttcttttcagagggtattttaaataaaaacattaagttatgacgaagaagaacggaaacgccttaaaccggaaaattttcataaatagcgaaaacccgcgaggtcgccgccccgtaacct

SEQ ID NO: 19 - DNA, 58032 bp, artificial
  PHP39307
gtcggatcaccggaaaggacccgtaaagtgataatgattatcatctacatatcacaacgtgcgtggaggccatcaaaccacgtcaaataatcaattatgacgcaggtatcgtattaattgatctgcatcaacttaacgtaaaaacaacttcagacaatacaaatcagcgacactgaatacggggcaacctcatgtcccccccccccccccccctgcaggcatcgtggtgtcacgctcgtcgtttggtatggcttcattcagctccggttcccaacgatcaaggcgagttacatgatcccccatgttgtgcaaaaaagcggttagctccttcggtcctccgatcgttgtcagaagtaagttggccgcagtgttatcactcatggttatggcagcactgcataattctcttactgtcatgccatccgtaagatgcttttctgtgactggtgagtactcaaccaagtcattctgagaatagtgtatgcggcgaccgagttgctcttgcccggcgtcaacacgggataataccgcgccacatagcagaactttaaaagtgctcatcattggaaaacgttcttcggggcgaaaactctcaaggatcttaccgctgttgagatccagttcgatgtaacccactcgtgcacccaactgatcttcagcatcttttactttcaccagcgtttctgggtgagcaaaaacaggaaggcaaaatgccgcaaaaaagggaataagggcgacacggaaatgttgaatactcatactcttcctttttcaatattattgaagcatttatcagggttattgtctcatgagcggatacatatttgaatgtatttagaaaaataaacaaataggggttccgcgcacatttccccgaaaagtgccacctgacgtctaagaaaccattattatcatgacattaacctataaaaataggcgtatcacgaggccctttcgtcttcaagaattggtcgacgatcttgctgcgttcggatattttcgtggagttcccgccacagacccggattgaaggcgagatccagcaactcgcgccagatcatcctgtgacggaactttggcgcgtgatgactggccaggacgtcggccgaaagagcgacaagcagatcacgcttttcgacagcgtcggatttgcgatcgaggatttttcggcgctgcgctacgtccgcgaccgcgttgagggatcaagccacagcagcccactcgaccttctagccgacccagacgagccaagggatctttttggaatgctgctccgtcgtcaggctttccgacgtttgggtggttgaacagaagtcattatcgtacggaatgccaagcactcccgaggggaaccctgtggttggcatgcacatacaaatggacgaacggataaaccttttcacgcccttttaaatatccgttattctaataaacgctcttttctcttaggtttacccgccaatatatcctgtcaaacactgatagtttaaactgaaggcgggaaacgacaatctgatcatgagcggagaattaagggagtcacgttatgacccccgccgatgacgcgggacaagccgttttacgtttggaactgacagaaccgcaacgttgaaggagccactcagcaagctggtacgattgtaatacgactcactatagggcgaattgagcgctgtttaaacgctcttcaactggaagagcggttaccagagctggtcacctttgtccaccaagatggaactgcggccgctcattaattaagtcaggcgcgcctctagttgaagacacgttcatgtcttcatcgtaagaagacactcagtagtcttcggccagaatggccatctggattcagcaggcctagaaggccatttaaatcctgaggatctggtcttcctaaggacccgggatatcgctatcaactttgtatagaaaagttgggccgaattcgagctcggtacggccagaatggcccggaccgggttaccgaattcgagctcggtaccctgggatccgagctctcccatatggtcgacctgcaggcggccgcgaattcactagtaacggccgccagtgtgctggaattcgcccttgagctccctttaatctggcgctagatctgcatccgcggcttgcaaagataaatggcacatttagtgtgttattttgcaatacctttcatagtagatatccttaaatgcagttttaggcatgtttgggtaattaaataacatttttaggaggagttttagatttacctttctttcgtgatgactgatgacagacgtggggaattcaaatgcaactctagcgaaagttcatatatttttcataaatagctgaggctggggtaattattttttgtagaaaaatagaataggtggaatggtttggggaaggcgtaggcgctcgtggacgacgccccataaaagacaagaggcggaattgccatgaattcgaggtagctaagtaaggcgcatatatatgccaaaaattctactgtcactttccaatttcaatgcgctgccaaacaagccgccgacccatggatactgacttgaattcagcccaattctgtagatccaaacagggccggcgtcagtgcctcaggtgagagagcagcagacgatgcaaagagccaaaagtggaagcagacgcagccgaagccgaagcccaagcccaaaactgttttgtctttgcccagaaccgcgacgagcctaaactgccgcttcctcctatctacaagtccctggcacatcacgcatagtccaaccatggcgcgcaggcgataaggcgcgccacggggacgcgacatgtggtggcggacgcgatcaggatagggccaggctggccgggcgcggccacgggagaacggtggccactcgtcccacatccgcttcgtcctgtcctgtactgcgtcctgcccccaacgagagccggagccggccatcccgtcgcacactctccccctctatatatgccgtcggtgtgggggagcctactacaggacgacccaagcaagcaagcaagcagcgagtacatacatactaggcagccaggcagtcaagcttatggcggccgccttctcctccaccgtcggagctccggtgggtgaccgcgcgtgttaattccaagcatctgctagctgctctgctactagttcagcgtcgggatcttcttcttcatgcatgcatttcatgatcatatatatatctcgatccttgagaccttcttgacggcatatatatgtatatgtacatgcatcatgcatcgaccgatcatcaggcctccaccccgaccaggagcagcttcctcgggaagaagctcaacaagccgcaggtgtcgtccgcggccgtgacctatcatggcaagagctccagcagcaacagcaggttcaaggccatggctgccaaggaagtcgatgaaacaaaacaatcggaccaggatcgttggaaaggcctggcctacgacatctcggacgaccagcaggacatcaccaggggcaagggcatggttgacaacctcttccaggcccctaccggggacggcacccacgtcgccgtgctcagctcctacgactacatcagccagggccaaaagtcctacaacttcgacaacatgatggatggcttctacatagccaagggcttcatggacaagctcgtcgtccatttgagcaaaaattttatgaccctgccaaacatcaaggttcccctcatcctgggtatctggggaggcaaaggccagggaaaatcgttccaatgcgagctggtcttcgccaagatgggcatcacgtacgttaatttatttcgattcgtctattattattgtcttcgataatatatactagctagctagtagtaaatcattccaatgcatgcatgcatgcagccccatcacgatgagcgccggcgagctggagagcggcaacgccggagagcccgccaagctcatcaggcagcgctaccgtgaggccgccgacatcatcaagaagggcaagatgtcctgcctcttcatcaacgacctcgacgccggcgcgggtcgcatgggcggcaccacccagtacacggtgaacaaccagatggtcaacgccaccctgatgaacatcgccgacaaccccaccaacgtgcagctcccggggatgtacaacaaggtggacaacgcacgcgtgcccatcatcgtcaccggcaacgacttctccacgctctacgcgccgctcatccgcgacggccgcatggagaagttctactgggcgcccacccgcgaggaccgcatcggcatctgcaagggcatcttccgcaccgacggcgtcgacgaggagcacgtcgtccagctggtcgacaccttccctggccagtccatcgacttcttcggcgcgctgcgtgcccgggtctacgacgacgaggtccgaaaatgggtggctgagaccggcgtcgagaacatcgccaggaagctcgtcaactccaaggagggcccgcccacgttcgagcagcccaagataacgatcgagaagctcttggagtacggacacatgctggtggcggagcaggagaacgtcaagcgtgtgcagcttgctgacaagtacctcaacgaggctgctcttggtgaagccaacgaggacgccatgaagactggctccttcttcaagtagatcgatagacttgtccatcttctggattggccaacttaattaatgtatgaaataaaaggatgcacacatagtgacatgctaatcactataatgtgggcatcaaagttgtgtgttatgtgtaattactagttatctgaataaaagagaaagagatcatccatatttcttatcctaaatgaatgtcacgtgtctttataattctttgatgaaccagatgcatttcattaaccaaatccatatacatataaatattaatcatatataattaatatcaattgggttagcaaaacaaatctagtctaggtgtgttttgcgaatgcggcctcaagtttgtacaaaaaagcaggctccggccagaatggcccggaccgggttaccgaattcgagctcggtaccaggtttttgtgatctgatgataagtggttggttcgtgtctcatgcacttgggaggtgatctatttcacctggtgtagtttgtgtttccgtcagttggaaaaacttatccctatcgatttcgttttcattttctgcttttcttttatgtaccttcgtttgggcttgtaacgggcctttgtatttcaactctcaataataatccaagtgcatgttaaacaatttgtcatctgtttcggctttgatatactactggtgaagatgggccgtactactgcatcacaacgaaaaataataataagatgaaaaacttgaagtggaaaaaaaaaaaaacttgaatgttcactactactcattgaccataatgtttaacatacatagctcaatagtatttttgtgaatatggcaacacaaacagtccaaaacaattgtctcttactataccaaaccaagggcgccgcttgtttgccactctttgtgtgcaatagtgtgattaccacatctccacattcaatatattccctgaattatctgacgattttgatggctcactgttttcccaagtcttgaattgtcttctgtgcgccagtcaaatgcatatgtgttgagtttatcttttaaatatcaagcttttgtttttaacttttgtttgtaaccaaaaactcacagtaggagtttgatcacataattttatgtttgcctttgcaatttctagtgagtctttgattaaaagcttgaaaagaaaatgcagccaagcttaccaagtaagttatgtgtattaaccagaggaagagagaatcttgcaaaatttcaacaaacacaaaaagaagtattactacgattggtggagaaagaaaacgattccaaatcttgaactgttgttgtaaaagcatagcagaaagtgggagacaaccgaaatagaaatgactataacttaatttaatgttatcattataatttcttctagcaaatatttagaaagtaaatatcacatcaacctttaatgtaattaagctttctctttttgattcatgtgagatgaaaagaaaaaaaagaagagaaaagtgtagaaaacacatcatttctaagctgaaggtacatagtacccttgtacttttggtttcacctgcatagagaaaacccacaagaatatgacagtctgatttgtcagtctcattctcaagcaacatttctctatccgttactttcatggtgaataacacaatccatcatcaatactttgtgttactcagaaactgaaagttattccgagtcttgcatatctttggacctactcgtttttctaccattattgctgattgttaagctctcgctacttgaatcggcattgttggagtgggaaggttcaaaaaattggagttatgactagttgtctctttctatgtacgatggagaaaatgaataaacaactgagaaaatggctcttgtttagttgatgatgctcttaagctttccactggttgccatatatgatttgggcatttcactttgatcttaatgggccttgtaaagcccaagactcatgattatctttagttgatgctcttaattaggtgtgggcaaataattcaaactgtatgtacccgaccaaaaccaaagcaaaaataatcgaaccaaaccgaaaatttaaaaataaccgaatgaaaactaaatcctataactgaaagaactgaaaccgaatcaaaatatttaatgtaaccaaaaatatccgaaatataattatattgtcaaaaatattaataatttctagattaaataattaaaaatacttaaaaatttatataaaatagtaaaaatactcgaaaataaccacaaatattcaaaaacaaccgaaatatcccaaaatattcaaagcaaaataaccgaatggataccaaattttaaaaccgaaaaaactggaacaaaaccaaaatcgaaccaaaatttcaaaaatcgaataaatactaaactttagaacaaaaaaaaacgataaccgaatgtatacgaaccaaagccgaattagataaccgaacgtccaggactactcttaatctttccgccacttatgatttgggctattactttgtttataatgagccttttcaagctcaagttcatgattgtccgtgagatgagaaactgacttgttggattcgaaaccctagctagtattggttaatacttaatacataaatgacctgcattgacatcatcatccaagaaaataaaaattgtatgcttgagatatttagttttcctagctaggttttctttattttagtaccgaatctttaggtgtgccacgttaatttagacccattttttcatacttaccaactgagtctagtttaatcatgactataatcgtataaaatgattcagtcgacgtcattgcgaacgtatataaaatcatccaaattgacgtcattccaaagaggtaagcatgcttatctaagagtccgagcatactaaacaagacgacattttatttgcactccaaatcaaattttgtattgcctaaagaaaaacaatcaaactcaagtttcttaaaattaatttcattcaaactaatcactttcaatatctcacatattattcatgccatttctatttgtctaaacatgatttaaaaaaaaaagtaaaatacaaagattactatgcaaaaactctataaaaaaaaattcaaatttcttatttatttgtgacatcaaattttcaaaataatttttttaattatcggttgatccggtcagtcgataaaaacataaactttcagcgaccgttaaaactttcctactaccgatttagagaaaatcttagcttgaaacgtaattgtaacctgccttcatgcaagtcgcaagatatgtcatcctaagttgtatatgttttctcaaaagatgtatttacttgagaaaatacgtttcaacgttgatggacaaccaattaagaatcaagcacctttcgtaatcaatttaggcttatcgtctaaggtatactgatttacgacagttgactagacttataaggaacaaaataatagaataatttcgtcaagaaaaattgattttggactcatactttacataatattttactcttaaatttatttaagtggctcctcgcatgatcccaaagagcaagcctagactatatggaaaagtttctaaacacttcacctaatcatagagactaagatggtaattcgtaaacgacaaagcctagtgacactgtccattgtaaaattccacatcatattagtattaaacatatacatgtagtttcctgaacacatgtagtatcaaacacacttcgtggcttcttcctcgaaacctggtaccctgggatctgtgcagcgtgacccggtcgtgcccctctctagagataatgagcattgcatgtctaagttataaaaaattaccacatattttttttgtcacacttgtttgaagtgcagtttatctatctttatacatatatttaaactttactctacgaataatataatctatagtactacaataatatcagtgttttagagaatcatataaatgaacagttagacatggtctaaaggacaattgagtattttgacaacaggactctacagttttatctttttagtgtgcatgtgttctcctttttttttgcaaatagcttcacctatataatacttcatccattttattagtacatccatttagggtttagggttaatggtttttatagactaatttttttagtacatctattttattctattttagcctctaaattaagaaaactaaaactctattttagtttttttatttaataatttagatataaaatagaataaaataaagtgactaaaaattaaacaaataccctttaagaaattaaaaaaactaaggaaacatttttcttgtttcgagtagataatgccagcctgttaaacgccgtcgacgagtctaacggacaccaaccagcgaaccagcagcgtcgcgtcgggccaagcgaagcagacggcacggcatctctgtcgctgcctctggacccctctcgagagttccgctccaccgttggacttgctccgctgtcggcatccagaaattgcgtggcggagcggcagacgtgagccggcacggcaggcggcctcctcctcctctcacggcaccggcagctacgggggattcctttcccaccgctccttcgctttcccttcctcgcccgccgtaataaatagacaccccctccacaccctctttccccaacctcgtgttgttcggagcgcacacacacacaaccatatctcccccaaatccacccgtcggcacctccgcttcaaggtacgccgctcgtcctcccccccccccctctctaccttctctagatcggcgttccggtccatgcatggttagggcccggtagttctacttctgttcatgtttgtgttagatccgtgtttgtgttagatccgtgctgctagcgttcgtacacggatgcgacctgtacgtcagacacgttctgattgctaacttgccagtgtttctctttggggaatcctgggatggctctagccgttccgcagacgggatcgatttcatgattttttttgtttcgttgcatagggtttggtttgcccttttcctttatttcaatatatgccgtgcacttgtttgtcgggtcatcttttcatgcttttttttgtcttggttgtgatgatgtggtctggttgggcggtcgttctagatcggagtagaattctgtttcaaactacctggtggatttattaattttggatctgtatgtgtgtgccatacatattcatagttacgaattgaagatgatggatggaaatatcgatctaggataggtatacatgttgatgcgggttttactgatgcatatacagagatgctttttgttcgcttggttgtgatgatgtggtgtggttgggcggtcgttcattcgttctagatcggagtagaatactgtttcaaactacctggtgtatttattaattttggaactgtatgtgtgtgtcatacatcttcatagttacgagtttaagatggatggaaatatcgatctaggataggtatacatgttgatgtgggttttactgatgcatatacatgatggcatatgcagcatctattcatatgctctaaccttgagtacctatctattataataaacaagtatgttttataattattttgatcttgatatacttggatgatggcatatgcagcagctatatgtggatttttttagccctgccttcatacgctatttatttgcttggtactgtttcttttgtcgatgctcaccctgttgtttggtgttacttctgcagggatccgtcccccagatttgctaggacaccaccgtacccacaccccggatcagttaatatcgtagacataatggccctccctgccatctctgcttcgtctcgtccacctcatcatgcatgcagcaggctgtgctgtggacctgatcgagtttcaattgatccaagcaagcaagagggaggtggactagacgaagcagaaattgcagagagagaccagtcgttgatcggtcggagatctccccgaatcgatctcgatcggccggaattttgggggccggccgggaggtggatgatggggggtgattaccatctaggcggcgccgtgttggatgatgtaccaacatatcactataggctactttgggaacctcagatccccttcgggattggaggaaattgagatggaaatgaactaatttcttctctaacccccttcaatcacgaaggggattcgagtttccaaactagccctatatatatcagagctagggagggatattgctgcaacatgcatcacgaggtacagatatataattagggttctgctgcaatgttttgactatagatcgttagtgatctgctgtaattaataataatggtgatctcgaagcaattctaaacatcatagtagcaggcccaccatggagacttgtccatcttctggattggccaacttaattaatgtatgaaataaaaggatgcacacatagtgacatgctaatcactataatgtgggcatcaaagttgtgtgttatgtgtaattactagttatctgaataaaagagaaagagatcatccatatttcttatcctaaatgaatgtcacgtgtctttataattctttgatgaaccagatgcatttcattaaccaaatccatatacatataaatattaatcatatataattaatatcaattgggttagcaaaacaaatctagtctaggtgtgttttgcgaatgcggcccccgggcacccagctttcttgtacaaagtggccgttaacggatcggccagaatggcccggaccgaagctggccgctctagaactagtggatctcgatgtgtagtctacgagaagggttaaccgtctcttcgtgagaataaccgtggcctaaaaataagccgatgaggataaataaaatgtggtggtacagtacttcaagaggtttactcatcaagaggatgcttttccgatgagctctagtagtacatcggacctcacatacctccattgtggtgaaatattttgtgctcatttagtgatgggtaaattttgtttatgtcactctaggttttgacatttcagttttgccactcttaggttttgacaaataatttccattccgcggcaaaagcaaaacaattttattttacttttaccactcttagctttcacaatgtatcacaaatgccactctagaaattctgtttatgccacagaatgtgaaaaaaaacactcacttatttgaagccaaggtgttcatggcatggaaatgtgacataaagtaacgttcgtgtataagaaaaaattgtactcctcgtaacaagagacggaaacatcatgagacaatcgcgtttggaaggctttgcatcacctttggatgatgcgcatgaatggagtcgtctgcttgctagccttcgcctaccgcccactgagtccgggcggcaactaccatcggcgaacgacccagctgacctctaccgaccggacttgaatgcgctaccttcgtcagcgacgatggccgcgtacgctggcgacgtgcccccgcatgcatggcggcacatggcgagctcagaccgtgcgtggctggctacaaatacgtaccccgtgagtgccctagctagaaacttacacctgcaactgcgagagcgagcgtgtgagtgtagccgagtagatcccccggtcgccaccatggcctcctccgagaacgtcatcaccgagttcatgcgcttcaaggtgcgcatggagggcaccgtgaacggccacgagttcgagatcgagggcgagggcgagggccgcccctacgagggccacaacaccgtgaagctgaaggtgaccaagggcggccccctgcccttcgcctgggacatcctgtccccccagttccagtacggctccaaggtgtacgtgaagcaccccgccgacatccccgactacaagaagctgtccttccccgagggcttcaagtgggagcgcgtgatgaacttcgaggacggcggcgtggcgaccgtgacccaggactcctccctgcaggacggctgcttcatctacaaggtgaagttcatcggcgtgaacttcccctccgacggccccgtgatgcagaagaagaccatgggctgggaggcctccaccgagcgcctgtacccccgcgacggcgtgctgaagggcgagacccacaaggccctgaagctgaaggacggcggccactacctggtggagttcaagtccatctacatggccaagaagcccgtgcagctgcccggctactactacgtggacgccaagctggacatcacctcccacaacgaggactacaccatcgtggagcagtacgagcgcaccgagggccgccaccacctgttcctgtagcggcccatggatattcgaacgcgtaggtaccacatggttaacctagacttgtccatcttctggattggccaacttaattaatgtatgaaataaaaggatgcacacatagtgacatgctaatcactataatgtgggcatcaaagttgtgtgttatgtgtaattactagttatctgaataaaagagaaagagatcatccatatttcttatcctaaatgaatgtcacgtgtctttataattctttgatgaaccagatgcatttcattaaccaaatccatatacatataaatattaatcatatataattaatatcaattgggttagcaaaacaaatctagtctaggtgtgttttgcgaatgcggccgccaccgcggtggagctcgaattccggtccgggcctagaaggccagcttcggccgccccgggcaactttattatacaaagttgatagatatcggaccgattaaactttaattcggtccgaagcttgcatgcctgcagtgcagcgtgacccggtcgtgcccctctctagagataatgagcattgcatgtctaagttataaaaaattaccacatattttttttgtcacacttgtttgaagtgcagtttatctatctttatacatatatttaaactttactctacgaataatataatctatagtactacaataatatcagtgttttagagaatcatataaatgaacagttagacatggtctaaaggacaattgagtattttgacaacaggactctacagttttatctttttagtgtgcatgtgttctcctttttttttgcaaatagcttcacctatataatacttcatccattttattagtacatccatttagggtttagggttaatggtttttatagactaatttttttagtacatctattttattctattttagcctctaaattaagaaaactaaaactctattttagtttttttatttaataatttagatataaaatagaataaaataaagtgactaaaaattaaacaaataccctttaagaaattaaaaaaactaaggaaacatttttcttgtttcgagtagataatgccagcctgttaaacgccgtcgacgagtctaacggacaccaaccagcgaaccagcagcgtcgcgtcgggccaagcgaagcagacggcacggcatctctgtcgctgcctctggacccctctcgagagttccgctccaccgttggacttgctccgctgtcggcatccagaaattgcgtggcggagcggcagacgtgagccggcacggcaggcggcctcctcctcctctcacggcaccggcagctacgggggattcctttcccaccgctccttcgctttcccttcctcgcccgccgtaataaatagacaccccctccacaccctctttccccaacctcgtgttgttcggagcgcacacacacacaaccagatctcccccaaatccacccgtcggcacctccgcttcaaggtacgccgctcgtcctcccccccccccctctctaccttctctagatcggcgttccggtccatgcatggttagggcccggtagttctacttctgttcatgtttgtgttagatccgtgtttgtgttagatccgtgctgctagcgttcgtacacggatgcgacctgtacgtcagacacgttctgattgctaacttgccagtgtttctctttggggaatcctgggatggctctagccgttccgcagacgggatcgatttcatgattttttttgtttcgttgcatagggtttggtttgcccttttcctttatttcaatatatgccgtgcacttgtttgtcgggtcatcttttcatgcttttttttgtcttggttgtgatgatgtggtctggttgggcggtcgttctagatcggagtagaattctgtttcaaactacctggtggatttattaattttggatctgtatgtgtgtgccatacatattcatagttacgaattgaagatgatggatggaaatatcgatctaggataggtatacatgttgatgcgggttttactgatgcatatacagagatgctttttgttcgcttggttgtgatgatgtggtgtggttgggcggtcgttcattcgttctagatcggagtagaatactgtttcaaactacctggtgtatttattaattttggaactgtatgtgtgtgtcatacatcttcatagttacgagtttaagatggatggaaatatcgatctaggataggtatacatgttgatgtgggttttactgatgcatatacatgatggcatatgcagcatctattcatatgctctaaccttgagtacctatctattataataaacaagtatgttttataattattttgatcttgatatacttggatgatggcatatgcagcagctatatgtggatttttttagccctgccttcatacgctatttatttgcttggtactgtttcttttgtcgatgctcaccctgttgtttggtgttacttctgcaggtcgactttaacttagcctaggatccacacgacaccatgtcccccgagcgccgccccgtcgagatccgcccggccaccgccgccgacatggccgccgtgtgcgacatcgtgaaccactacatcgagacctccaccgtgaacttccgcaccgagccgcagaccccgcaggagtggatcgacgacctggagcgcctccaggaccgctacccgtggctcgtggccgaggtggagggcgtggtggccggcatcgcctacgccggcccgtggaaggcccgcaacgcctacgactggaccgtggagtccaccgtgtacgtgtcccaccgccaccagcgcctcggcctcggctccaccctctacacccacctcctcaagagcatggaggcccagggcttcaagtccgtggtggccgtgatcggcctcccgaacgacccgtccgtgcgcctccacgaggccctcggctacaccgcccgcggcaccctccgcgccgccggctacaagcacggcggctggcacgacgtcggcttctggcagcgcgacttcgagctgccggccccgccgcgcccggtgcgcccggtgacgcagatctgagtcgaaacctagacttgtccatcttctggattggccaacttaattaatgtatgaaataaaaggatgcacacatagtgacatgctaatcactataatgtgggcatcaaagttgtgtgttatgtgtaattactagttatctgaataaaagagaaagagatcatccatatttcttatcctaaatgaatgtcacgtgtctttataattctttgatgaaccagatgcatttcattaaccaaatccatatacatataaatattaatcatatataattaatatcaattgggttagcaaaacaaatctagtctaggtgtgttttgcgaatgcggccgccaccgcggtggagctcgaattcattccgattaatcgtggcctcttgctcttcaggatgaagagctatgtttaaacgtgcaagcgctactagacaattcagtacattaaaaacgtccgcaatgtgttattaagttgtctaagcgtcaatttgtttacaccacaatatatcctgccaccagccagccaacagctccccgaccggcagctcggcacaaaatcaccactcgatacaggcagcccatcagtccgggacggcgtcagcgggagagccgttgtaaggcggcagactttgctcatgttaccgatgctattcggaagaacggcaactaagctgccgggtttgaaacacggatgatctcgcggagggtagcatgttgattgtaacgatgacagagcgttgctgcctgtgatcaaatatcatctccctcgcagagatccgaattatcagccttcttattcatttctcgcttaaccgtgacaggctgtcgatcttgagaactatgccgacataataggaaatcgctggataaagccgctgaggaagctgagtggcgctatttctttagaagtgaacgttgacgatcgtcgaccgtaccccgatgaattaattcggacgtacgttctgaacacagctggatacttacttgggcgattgtcatacatgacatcaacaatgtacccgtttgtgtaaccgtctcttggaggttcgtatgacactagtggttcccctcagcttgcgactagatgttgaggcctaacattttattagagagcaggctagttgcttagatacatgatcttcaggccgttatctgtcagggcaagcgaaaattggccatttatgacgaccaatgccccgcagaagctcccatctttgccgccatagacgccgcgccccccttttggggtgtagaacatccttttgccagatgtggaaaagaagttcgttgtcccattgttggcaatgacgtagtagccggcgaaagtgcgagacccatttgcgctatatataagcctacgatttccgttgcgactattgtcgtaattggatgaactattatcgtagttgctctcagagttgtcgtaatttgatggactattgtcgtaattgcttatggagttgtcgtagttgcttggagaaatgtcgtagttggatggggagtagtcatagggaagacgagcttcatccactaaaacaattggcaggtcagcaagtgcctgccccgatgccatcgcaagtacgaggcttagaaccaccttcaacagatcgcgcatagtcttccccagctctctaacgcttgagttaagccgcgccgcgaagcggcgtcggcttgaacgaattgttagacattatttgccgactaccttggtgatctcgcctttcacgtagtgaacaaattcttccaactgatctgcgcgcgaggccaagcgatcttcttgtccaagataagcctgcctagcttcaagtatgacgggctgatactgggccggcaggcgctccattgcccagtcggcagcgacatccttcggcgcgattttgccggttactgcgctgtaccaaatgcgggacaacgtaagcactacatttcgctcatcgccagcccagtcgggcggcgagttccatagcgttaaggtttcatttagcgcctcaaatagatcctgttcaggaaccggatcaaagagttcctccgccgctggacctaccaaggcaacgctatgttctcttgcttttgtcagcaagatagccagatcaatgtcgatcgtggctggctcgaagatacctgcaagaatgtcattgcgctgccattctccaaattgcagttcgcgcttagctggataacgccacggaatgatgtcgtcgtgcacaacaatggtgacttctacagcgcggagaatctcgctctctccaggggaagccgaagtttccaaaaggtcgttgatcaaagctcgccgcgttgtttcatcaagccttacagtcaccgtaaccagcaaatcaatatcactgtgtggcttcaggccgccatccactgcggagccgtacaaatgtacggccagcaacgtcggttcgagatggcgctcgatgacgccaactacctctgatagttgagtcgatacttcggcgatcaccgcttccctcatgatgtttaactcctgaattaagccgcgccgcgaagcggtgtcggcttgaatgaattgttaggcgtcatcctgtgctcccgagaaccagtaccagtacatcgctgtttcgttcgagacttgaggtctagttttatacgtgaacaggtcaatgccgccgagagtaaagccacattttgcgtacaaattgcaggcaggtacattgttcgtttgtgtctctaatcgtatgccaaggagctgtctgcttagtgcccactttttcgcaaattcgatgagactgtgcgcgactcctttgcctcggtgcgtgtgcgacacaacaatgtgttcgatagaggctagatcgttccatgttgagttgagttcaatcttcccgacaagctcttggtcgatgaatgcgccatagcaagcagagtcttcatcagagtcatcatccgagatgtaatccttccggtaggggctcacacttctggtagatagttcaaagccttggtcggataggtgcacatcgaacacttcacgaacaatgaaatggttctcagcatccaatgtttccgccacctgctcagggatcaccgaaatcttcatatgacgcctaacgcctggcacagcggatcgcaaacctggcgcggcttttggcacaaaaggcgtgacaggtttgcgaatccgttgctgccacttgttaacccttttgccagatttggtaactataatttatgttagaggcgaagtcttgggtaaaaactggcctaaaattgctggggatttcaggaaagtaaacatcaccttccggctcgatgtctattgtagatatatgtagtgtatctacttgatcgggggatctgctgcctcgcgcgtttcggtgatgacggtgaaaacctctgacacatgcagctcccggagacggtcacagcttgtctgtaagcggatgccgggagcagacaagcccgtcagggcgcgtcagcgggtgttggcgggtgtcggggcgcagccatgacccagtcacgtagcgatagcggagtgtatactggcttaactatgcggcatcagagcagattgtactgagagtgcaccatatgcggtgtgaaataccgcacagatgcgtaaggagaaaataccgcatcaggcgctcttccgcttcctcgctcactgactcgctgcgctcggtcgttcggctgcggcgagcggtatcagctcactcaaaggcggtaatacggttatccacagaatcaggggataacgcaggaaagaacatgtgagcaaaaggccagcaaaaggccaggaaccgtaaaaaggccgcgttgctggcgtttttccataggctccgcccccctgacgagcatcacaaaaatcgacgctcaagtcagaggtggcgaaacccgacaggactataaagataccaggcgtttccccctggaagctccctcgtgcgctctcctgttccgaccctgccgcttaccggatacctgtccgcctttctcccttcgggaagcgtggcgctttctcatagctcacgctgtaggtatctcagttcggtgtaggtcgttcgctccaagctgggctgtgtgcacgaaccccccgttcagcccgaccgctgcgccttatccggtaactatcgtcttgagtccaacccggtaagacacgacttatcgccactggcagcagccactggtaacaggattagcagagcgaggtatgtaggcggtgctacagagttcttgaagtggtggcctaactacggctacactagaaggacagtatttggtatctgcgctctgctgaagccagttaccttcggaaaaagagttggtagctcttgatccggcaaacaaaccaccgctggtagcggtggtttttttgtttgcaagcagcagattacgcgcagaaaaaaaggatctcaagaagatcctttgatcttttctacggggtctgacgctcagtggaacgaaaactcacgttaagggattttggtcatgagattatcaaaaaggatcttcacctagatccttttaaattaaaaatgaagttttaaatcaatctaaagtatatatgagtaaacttggtctgacagttaccaatgcttaatcagtgaggcacctatctcagcgatctgtctatttcgttcatccatagttgcctgactccccgtcgtgtagataactacgatacgggagggcttaccatctggccccagtgctgcaatgataccgcgagacccacgctcaccggctccagatttatcagcaataaaccagccagccggaagggccgagcgcagaagtggtcctgcaactttatccgcctccatccagtctattaattgttgccgggaagctagagtaagtagttcgccagttaatagtttgcgcaacgttgttgccattgctgcagggggggggggggggggggacttccattgttcattccacggacaaaaacagagaaaggaaacgacagaggccaaaaagcctcgctttcagcacctgtcgtttcctttcttttcagagggtattttaaataaaaacattaagttatgacgaagaagaacggaaacgccttaaaccggaaaattttcataaatagcgaaaacccgcgaggtcgccgccccgtaacctgtcggatcaccggaaaggacccgtaaagtgataatgattatcatctacatatcacaacgtgcgtggaggccatcaaaccacgtcaaataatcaattatgacgcaggtatcgtattaattgatctgcatcaacttaacgtaaaaacaacttcagacaatacaaatcagcgacactgaatacggggcaacctcatgtcccccccccccccccccctgcaggcatcgtggtgtcacgctcgtcgtttggtatggcttcattcagctccggttcccaacgatcaaggcgagttacatgatcccccatgttgtgcaaaaaagcggttagctccttcggtcctccgatcgttgtcagaagtaagttggccgcagtgttatcactcatggttatggcagcactgcataattctcttactgtcatgccatccgtaagatgcttttctgtgactggtgagtactcaaccaagtcattctgagaatagtgtatgcggcgaccgagttgctcttgcccggcgtcaacacgggataataccgcgccacatagcagaactttaaaagtgctcatcattggaaaacgttcttcggggcgaaaactctcaaggatcttaccgctgttgagatccagttcgatgtaacccactcgtgcacccaactgatcttcagcatcttttactttcaccagcgtttctgggtgagcaaaaacaggaaggcaaaatgccgcaaaaaagggaataagggcgacacggaaatgttgaatactcatactcttcctttttcaatattattgaagcatttatcagggttattgtctcatgagcggatacatatttgaatgtatttagaaaaataaacaaataggggttccgcgcacatttccccgaaaagtgccacctgacgtctaagaaaccattattatcatgacattaacctataaaaataggcgtatcacgaggccctttcgtcttcaagaattcggagcttttgccattctcaccggattcagtcgtcactcatggtgatttctcacttgataaccttatttttgacgaggggaaattaataggttgtattgatgttggacgagtcggaatcgcagaccgataccaggatcttgccatcctatggaactgcctcggtgagttttctccttcattacagaaacggctttttcaaaaatatggtattgataatcctgatatgaataaattgcagtttcatttgatgctcgatgagtttttctaatcagaattggttaattggttgtaacactggcagagcattacgctgacttgacgggacggcggctttgttgaataaatcgaacttttgctgagttgaaggatcagatcacgcatcttcccgacaacgcagaccgttccgtggcaaagcaaaagttcaaaatcaccaactggtccacctacaacaaagctctcatcaaccgtggctccctcactttctggctggatgatggggcgattcaggcctggtatgagtcagcaacaccttcttcacgaggcagacctcagcgccagaaggccgccagagaggccgagcgcggccgtgaggcttggacgctagggcagggcatgaaaaagcccgtagcgggctgctacgggcgtctgacgcggtggaaagggggaggggatgttgtctacatggctctgctgtagtgagtgggttgcgctccggcagcggtcctgatcaatcgtcaccctttctcggtccttcaacgttcctgacaacgagcctccttttcgccaatccatcgacaatcaccgcgagtccctgctcgaacgctgcgtccggaccggcttcgtcgaaggcgtctatcgcggcccgcaacagcggcgagagcggagcctgttcaacggtgccgccgcgctcgccggcatcgctgtcgccggcctgctcctcaagcacggccccaacagtgaagtagctgattgtcatcagcgcattgacggcgtccccggccgaaaaacccgcctcgcagaggaagcgaagctgcgcgtcggccgtttccatctgcggtgcgcccggtcgcgtgccggcatggatgcgcgcgccatcgcggtaggcgagcagcgcctgcctgaagctgcgggcattcccgatcagaaatgagcgccagtcgtcgtcggctctcggcaccgaatgcgtatgattctccgccagcatggcttcggccagtgcgtcgagcagcgcccgcttgttcctgaagtgccagtaaagcgccggctgctgaacccccaaccgttccgccagtttgcgtgtcgtcagaccgtctacgccgacctcgttcaacaggtccagggcggcacggatcactgtattcggctgcaactttgtcatgcttgacactttatcactgataaacataatatgtccaccaacttatcagtgataaagaatccgcgcgttcaatcggaccagcggaggctggtccggaggccagacgtgaaacccaacatacccctgatcgtaattctgagcactgtcgcgctcgacgctgtcggcatcggcctgattatgccggtgctgccgggcctcctgcgcgatctggttcactcgaacgacgtcaccgcccactatggcattctgctggcgctgtatgcgttggtgcaatttgcctgcgcacctgtgctgggcgcgctgtcggatcgtttcgggcggcggccaatcttgctcgtctcgctggccggcgccactgtcgactacgccatcatggcgacagcgcctttcctttgggttctctatatcgggcggatcgtggccggcatcaccggggcgactggggcggtagccggcgcttatattgccgatatcactgatggcgatgagcgcgcgcggcacttcggcttcatgagcgcctgtttcgggttcgggatggtcgcgggacctgtgctcggtgggctgatgggcggtttctccccccacgctccgttcttcgccgcggcagccttgaacggcctcaatttcctgacgggctgtttccttttgccggagtcgcacaaaggcgaacgccggccgttacgccgggaggctctcaacccgctcgcttcgttccggtgggcccggggcatgaccgtcgtcgccgccctgatggcggtcttcttcatcatgcaacttgtcggacaggtgccggccgcgctttgggtcattttcggcgaggatcgctttcactgggacgcgaccacgatcggcatttcgcttgccgcatttggcattctgcattcactcgcccaggcaatgatcaccggccctgtagccgcccggctcggcgaaaggcgggcactcatgctcggaatgattgccgacggcacaggctacatcctgcttgccttcgcgacacggggatggatggcgttcccgatcatggtcctgcttgcttcgggtggcatcggaatgccggcgctgcaagcaatgttgtccaggcaggtggatgaggaacgtcaggggcagctgcaaggctcactggcggcgctcaccagcctgacctcgatcgtcggacccctcctcttcacggcgatctatgcggcttctataacaacgtggaacgggtgggcatggattgcaggcgctgccctctacttgctctgcctgccggcgctgcgtcgcgggctttggagcggcgcagggcaacgagccgatcgctgatcgtggaaacgataggcctatgccatgcgggtcaaggcgacttccggcaagctatacgcgccctaggagtgcggttggaacgttggcccagccagatactcccgatcacgagcaggacgccgatgatttgaagcgcactcagcgtctgatccaagaacaaccatcctagcaacacggcggtccccgggctgagaaagcccagtaaggaaacaactgtaggttcgagtcgcgagatcccccggaaccaaaggaagtaggttaaacccgctccgatcaggccgagccacgccaggccgagaacattggttcctgtaggcatcgggattggcggatcaaacactaaagctactggaacgagcagaagtcctccggccgccagttgccaggcggtaaaggtgagcagaggcacgggaggttgccacttgcgggtcagcacggttccgaacgccatggaaaccgcccccgccaggcccgctgcgacgccgacaggatctagcgctgcgtttggtgtcaacaccaacagcgccacgcccgcagttccgcaaatagcccccaggaccgccatcaatcgtatcgggctacctagcagagcggcagagatgaacacgaccatcagcggctgcacagcgcctaccgtcgccgcgaccccgcccggcaggcggtagaccgaaataaacaacaagctccagaatagcgaaatattaagtgcgccgaggatgaagatgcgcatccaccagattcccgttggaatctgtcggacgatcatcacgagcaataaacccgccggcaacgcccgcagcagcataccggcgacccctcggcctcgctgttcgggctccacgaaaacgccggacagatgcgccttgtgagcgtccttggggccgtcctcctgtttgaagaccgacagcccaatgatctcgccgtcgatgtaggcgccgaatgccacggcatctcgcaaccgttcagcgaacgcctccatgggctttttctcctcgtgctcgtaaacggacccgaacatctctggagctttcttcagggccgacaatcggatctcgcggaaatcctgcacgtcggccgctccaagccgtcgaatctgagccttaatcacaattgtcaattttaatcctctgtttatcggcagttcgtagagcgcgccgtgcgtcccgagcgatactgagcgaagcaagtgcgtcgagcagtgcccgcttgttcctgaaatgccagtaaagcgctggctgctgaacccccagccggaactgaccccacaaggccctagcgtttgcaatgcaccaggtcatcattgacccaggcgtgttccaccaggccgctgcctcgcaactcttcgcaggcttcgccgacctgctcgcgccacttcttcacgcgggtggaatccgatccgcacatgaggcggaaggtttccagcttgagcgggtacggctcccggtgcgagctgaaatagtcgaacatccgtcgggccgtcggcgacagcttgcggtacttctcccatatgaatttcgtgtagtggtcgccagcaaacagcacgacgatttcctcgtcgatcaggacctggcaacgggacgttttcttgccacggtccaggacgcggaagcggtgcagcagcgacaccgattccaggtgcccaacgcggtcggacgtgaagcccatcgccgtcgcctgtaggcgcgacaggcattcctcggccttcgtgtaataccggccattgatcgaccagcccaggtcctggcaaagctcgtagaacgtgaaggtgatcggctcgccgataggggtgcgcttcgcgtactccaacacctgctgccacaccagttcgtcatcgtcggcccgcagctcgacgccggtgtaggtgatcttcacgtccttgttgacgtggaaaatgaccttgttttgcagcgcctcgcgcgggattttcttgttgcgcgtggtgaacagggcagagcgggccgtgtcgtttggcatcgctcgcatcgtgtccggccacggcgcaatatcgaacaaggaaagctgcatttccttgatctgctgcttcgtgtgtttcagcaacgcggcctgcttggcctcgctgacctgttttgccaggtcctcgccggcggtttttcgcttcttggtcgtcatagttcctcgcgtgtcgatggtcatcgacttcgccaaacctgccgcctcctgttcgagacgacgcgaacgctccacggcggccgatggcgcgggcagggcagggggagccagttgcacgctgtcgcgctcgatcttggccgtagcttgctggaccatcgagccgacggactggaaggtttcgcggggcgcacgcatgacggtgcggcttgcgatggtttcggcatcctcggcggaaaaccccgcgtcgatcagttcttgcctgtatgccttccggtcaaacgtccgattcattcaccctccttgcgggattgccccgactcacgccggggcaatgtgcccttattcctgatttgacccgcctggtgccttggtgtccagataatccaccttatcggcaatgaagtcggtcccgtagaccgtctggccgtccttctcgtacttggtattccgaatcttgccctgcacgaataccagcgaccccttgcccaaatacttgccgtgggcctcggcctgagagccaaaacacttgatgcggaagaagtcggtgcgctcctgcttgtcgccggcatcgttgcgccactcttcattaaccgctatatcgaaaattgcttgcggcttgttagaattgccatgacgtacctcggtgtcacgggtaagattaccgataaactggaactgattatggctcatatcgaaagtctccttgagaaaggagactctagtttagctaaacattggttccgctgtcaagaactttagcggctaaaattttgcgggccgcgaccaaaggtgcgaggggcggcttccgctgtgtacaaccagatatttttcaccaacatccttcgtctgctcgatgagcggggcatgacgaaacatgagctgtcggagagggcaggggtttcaatttcgtttttatcagacttaaccaacggtaaggccaacccctcgttgaaggtgatggaggccattgccgacgccctggaaactcccctacctcttctcctggagtccaccgaccttgaccgcgaggcactcgcggagattgcgggtcatcctttcaagagcagcgtgccgcccggatacgaacgcatcagtgtggttttgccgtcacataaggcgtttatcgtaaagaaatggggcgacgacacccgaaaaaagctgcgtggaaggctctgacgccaagggttagggcttgcacttccttctttagccgctaaaacggccccttctctgcgggccgtcggctcgcgcatcatatcgacatcctcaacggaagccgtgccgcgaatggcatcgggcgggtgcgctttgacagttgttttctatcagaacccctacgtcgtgcggttcgattagctgtttgtcttgcaggctaaacactttcggtatatcgtttgcctgtgcgataatgttgctaatgatttgttgcgtaggggttactgaaaagtgagcgggaaagaagagtttcagaccatcaaggagcgggccaagcgcaagctggaacgcgacatgggtgcggacctgttggccgcgctcaacgacccgaaaaccgttgaagtcatgctcaacgcggacggcaaggtgtggcacgaacgccttggcgagccgatgcggtacatctgcgacatgcggcccagccagtcgcaggcgattatagaaacggtggccggattccacggcaaagaggtcacgcggcattcgcccatcctggaaggcgagttccccttggatggcagccgctttgccggccaattgccgccggtcgtggccgcgccaacctttgcgatccgcaagcgcgcggtcgccatcttcacgctggaacagtacgtcgaggcgggcatcatgacccgcgagcaatacgaggtcattaaaagcgccgtcgcggcgcatcgaaacatcctcgtcattggcggtactggctcgggcaagaccacgctcgtcaacgcgatcatcaatgaaatggtcgccttcaacccgtctgagcgcgtcgtcatcatcgaggacaccggcgaaatccagtgcgccgcagagaacgccgtccaataccacaccagcatcgacgtctcgatgacgctgctgctcaagacaacgctgcgtatgcgccccgaccgcatcctggtcggtgaggtacgtggccccgaagcccttgatctgttgatggcctggaacaccgggcatgaaggaggtgccgccaccctgcacgcaaacaaccccaaagcgggcctgagccggctcgccatgcttatcagcatgcacccggattcaccgaaacccattgagccgctgattggcgaggcggttcatgtggtcgtccatatcgccaggacccctagcggccgtcgagtgcaagaaattctcgaagttcttggttacgagaacggccagtacatcaccaaaaccctgtaaggagtatttccaatgacaacggctgttccgttccgtctgaccatgaatcgcggcattttgttctaccttgccgtgttcttcgttctcgctctcgcgttatccgcgcatccggcgatggcctcggaaggcaccggcggcagcttgccatatgagagctggctgacgaacctgcgcaactccgtaaccggcccggtggccttcgcgctgtccatcatcggcatcgtcgtcgccggcggcgtgctgatcttcggcggcgaactcaacgccttcttccgaaccctgatcttcctggttctggtgatggcgctgctggtcggcgcgcagaacgtgatgagcaccttcttcggtcgtggtgccgaaatcgcggccctcggcaacggggcgctgcaccaggtgcaagtcgcggcggcggatgccgtgcgtgcggtagcggctggacggctcgcctaatcatggctctgcgcacgatccccatccgtcgcgcaggcaaccgagaaaacctgttcatgggtggtgatcgtgaactggtgatgttctcgggcctgatggcgtttgcgctgattttcagcgcccaagagctgcgggccaccgtggtcggtctgatcctgtggttcggggcgctctatgcgttccgaatcatggcgaaggccgatccgaagatgcggttcgtgtacctgcgtcaccgccggtacaagccgtattacccggcccgctcgaccccgttccgcgagaacaccaatagccaagggaagcaataccgatgatccaagcaattgcgattgcaatcgcgggcctcggcgcgcttctgttgttcatcctctttgcccgcatccgcgcggtcgatgccgaactgaaactgaaaaagcatcgttccaaggacgccggcctggccgatctgctcaactacgccgctgtcgtcgatgacggcgtaatcgtgggcaagaacggcagctttatggctgcctggctgtacaagggcgatgacaacgcaagcagcaccgaccagcagcgcgaagtagtgtccgcccgcatcaaccaggccctcgcgggcctgggaagtgggtggatgatccatgtggacgccgtgcggcgtcctgctccgaactacgcggagcggggcctgtcggcgttccctgaccgtctgacggcagcgattgaagaagagcgctcggtcttgccttgctcgtcggtgatgtacttcaccagctccgcgaagtcgctcttcttgatggagcgcatggggacgtgcttggcaatcacgcgcaccccccggccgttttagcggctaaaaaagtcatggctctgccctcgggcggaccacgcccatcatgaccttgccaagctcgtcctgcttctcttcgatcttcgccagcagggcgaggatcgtggcatcaccgaaccgcgccgtgcgcgggtcgtcggtgagccagagtttcagcaggccgcccaggcggcccaggtcgccattgatgcgggccagctcgcggacgtgctcatagtccacgacgcccgtgattttgtagccctggccgacggccagcaggtaggccgacaggctcatgccggccgccgccgccttttcctcaatcgctcttcgttcgtctggaaggcagtacaccttgataggtgggctgcccttcctggttggcttggtttcatcagccatccgcttgccctcatctgttacgccggcggtagccggccagcctcgcagagcaggattcccgttgagcaccgccaggtgcgaataagggacagtgaagaaggaacacccgctcgcgggtgggcctacttcacctatcctgcccggctgacgccgttggatacaccaaggaaagtctacacgaaccctttggcaaaatcctgtatatcgtgcgaaaaaggatggatataccgaaaaaatcgctataatgaccccgaagcagggttatgcagcggaaaagcgctgcttccctgctgttttgtggaatatctaccgactggaaacaggcaaatgcaggaaattactgaactgaggggacaggcgagagacgatgccaaagagctacaccgacgagctggccgagtgggttgaatcccgcgcggccaagaagcgccggcgtgatgaggctgcggttgcgttcctggcggtgagggcggatgtcgaggcggcgttagcgtccggctatgcgctcgtcaccatttgggagcacatgcgggaaacggggaaggtcaagttctcctacgagacgttccgctcgcacgccaggcggcacatcaaggccaagcccgccgatgtgcccgcaccgcaggccaaggctgcggaacccgcgccggcacccaagacgccggagccacggcggccgaagcaggggggcaaggctgaaaagccggcccccgctgcggccccgaccggcttcaccttcaacccaacaccggacaaaaaggatctactgtaatggcgaaaattcacatggttttgcagggcaagggcggggtcggcaagtcggccatcgccgcgatcattgcgcagtacaagatggacaaggggcagacacccttgtgcatcgacaccgacccggtgaacgcgacgttcgagggctacaaggccctgaacgtccgccggctgaacatcatggccggcgacgaaattaactcgcgcaacttcgacaccctggtcgagctgattgcgccgaccaaggatgacgtggtgatcgacaacggtgccagctcgttcgtgcctctgtcgcattacctcatcagcaaccaggtgccggctctgctgcaagaaatggggcatgagctggtcatccataccgtcgtcaccggcggccaggctctcctggacacggtgagcggcttcgcccagctcgccagccagttcccggccgaagcgcttttcgtggtctggctgaacccgtattgggggcctatcgagcatgagggcaagagctttgagcagatgaaggcgtacacggccaacaaggcccgcgtgtcgtccatcatccagattccggccctcaaggaagaaacctacggccgcgatttcagcgacatgctgcaagagcggctgacgttcgaccaggcgctggccgatgaatcgctcacgatcatgacgcggcaacgcctcaagatcgtgcggcgcggcctgtttgaacagctcgacgcggcggccgtgctatgagcgaccagattgaagagctgatccgggagattgcggccaagcacggcatcgccgtcggccgcgacgacccggtgctgatcctgcataccatcaacgcccggctcatggccgacagtgcggccaagcaagaggaaatccttgccgcgttcaaggaagagctggaagggatcgcccatcgttggggcgaggacgccaaggccaaagcggagcggatgctgaacgcggccctggcggccagcaaggacgcaatggcgaaggtaatgaaggacagcgccgcgcaggcggccgaagcgatccgcagggaaatcgacgacggccttggccgccagctcgcggccaaggtcgcggacgcgcggcgcgtggcgatgatgaacatgatcgccggcggcatggtgttgttcgcggccgccctggtggtgtgggcctcgttatgaatcgcagaggcgcagatgaaaaagcccggcgttgccgggctttgtttttgcgttagctgggcttgtttgacaggcccaagctctgactgcgcccgcgctcgcgctcctgggcctgtttcttctcctgctcctgcttgcgcatcagggcctggtgccgtcgggctgcttcacgcatcgaatcccagtcgccggccagctcgggatgctccgcgcgcatcttgcgcgtcgccagttcctcgatcttgggcgcgtgaatgcccatgccttccttgatttcgcgcaccatgtccagccgcgtgtgcagggtctgcaagcgggcttgctgttgggcctgctgctgctgccaggcggcctttgtacgcggcagggacagcaagccgggggcattggactgtagctgctgcaaacgcgcctgctgacggtctacgagctgttctaggcggtcctcgatgcgctccacctggtcatgctttgcctgcacgtagagcgcaagggtctgctggtaggtctgctcgatgggcgcggattctaagagggcctgctgttccgtctcggcctcctgggccgcctgtagcaaatcctcgccgctgttgccgctggactgctttactgccggggactgctgttgccctgctcgcgccgtcgtcgcagttcggcttgcccccactcgattgactgcttcatttcgagccgcagcgatgcgatctcggattgcgtcaacggacggggcagcgcggaggtgtccggcttctccttgggtgagtcggtcgatgccatagccaaaggtttccttccaaaatgcgtccattgctggaccgtgtttctcattgatgcccgcaagcatcttcggcttgaccgccaggtcaagcgcgccttcatgggcggtcatgacggacgccgccatgaccttgccgccgttgttctcgatgtagccgcgtaatgaggcaatggtgccgcccatcgtcagcgtgtcatcgacaacgatgtacttctggccggggatcacctccccctcgaaagtcgggttgaacgccaggcgatgatctgaaccggctccggttcgggcgaccttctcccgctgcacaatgtccgtttcgacctcaaggccaaggcggtcggccagaacgaccgccatcatggccggaatcttgttgttccccgccgcctcgacggcgaggactggaacgatgcggggcttgtcgtcgccgatcagcgtcttgagctgggcaacagtgtcgtccgaaatcaggcgctcgaccaaattaagcgccgcttccgcgtcgccctgcttcgcagcctggtattcaggctcgttggtcaaagaaccaaggtcgccgttgcgaaccaccttcgggaagtctccccacggtgcgcgctcggctctgctgtagctgctcaagacgcctccctttttagccgctaaaactctaacgagtgcgcccgcgactcaacttgacgctttcggcacttacctgtgccttgccacttgcgtcataggtgatgcttttcgcactcccgatttcaggtactttatcgaaatctgaccgggcgtgcattacaaagttcttccccacctgttggtaaatgctgccgctatctgcgtggacgatgctgccgtcgtggcgctgcgacttatcggccttttgggccatatagatgttgtaaatgccaggtttcagggccccggctttatctaccttctggttcgtccatgcgccttggttctcggtctggacaattctttgcccattcatgaccaggaggcggtgtttcattgggtgactcctgacggttgcctctggtgttaaacgtgtcctggtcgcttgccggctaaaaaaaagccgacctcggcagttcgaggccggctttccctagagccgggcgcgtcaaggttgttccatctattttagtgaactgcgttcgatttatcagttactttcctcccgctttgtgtttcctcccactcgtttccgcgtctagccgacccctcaacatagcggcctcttcttgggctgcctttgcctcttgccgcgcttcgtcacgctcggcttgcaccgtcgtaaagcgctcggcctgcctggccgcctcttgcgccgccaacttcctttgctcctggtgggcctcggcgtcggcctgcgccttcgctttcaccgctgccaactccgtgcgcaaactctccgcttcgcgcctggtggcgtcgcgctcgccgcgaagcgcctgcatttcctggttggccgcgtccagggtcttgcggctctcttctttgaatgcgcgggcgtcctggtgagcgtagtccagctcggcgcgcagctcctgcgctcgacgctccacctcgtcggcccgctgcgtcgccagcgcggcccgctgctcggctcctgccagggcggtgcgtgcttcggccagggcttgccgctggcgtgcggccagctcggccgcctcggcggcctgctgctctagcaatgtaacgcgcgcctgggcttcttccagctcgcgggcctgcgcctcgaaggcgtcggccagctccccgcgcacggcttccaactcgttgcgctcacgatcccagccggcttgcgctgcctgcaacgattcattggcaagggcctgggcggcttgccagagggcggccacggcctggttgccggcctgctgcaccgcgtccggcacctggactgccagcggggcggcctgcgccgtgcgctggcgtcgccattcgcgcatgccggcgctggcgtcgttcatgttgacgcgggcggccttacgcactgcatccacggtcgggaagttctcccggtcgccttgctcgaacagctcgtccgcagccgcaaaaatgcggtcgcgcgtctctttgttcagttccatgttggctccggtaattggtaagaataataatactcttacctaccttatcagcgcaagagtttagctgaacagttctcgacttaacggcaggttttttagcggctgaagggcaggcaaaaaaagccccgcacggtcggcgggggcaaagggtcagcgggaaggggattagcgggcgtcgggcttcttcatgcgtcggggccgcgcttcttgggatggagcacgacgaagcgcgcacgcgcatcgtcctcggccctatcggcccgcgtcgcggtcaggaacttgtcgcgcgctaggtcctccctggtgggcaccaggggcatgaactcggcctgctcgatgtaggtccactccatgaccgcatcgcagtcgaggccgcgttccttcaccgtctcttgcaggtcgcggtacgcccgctcgttgagcggctggtaacgggccaattggtcgtaaatggctgtcggccatgagcggcctttcctgttgagccagcagccgacgacgaagccggcaatgcaggcccctggcacaaccaggccgacgccgggggcaggggatggcagcagctcgccaaccaggaaccccgccgcgatgatgccgatgccggtcaaccagcccttgaaactatccggccccgaaacacccctgcgcattgcctggatgctgcgccggatagcttgcaacatcaggagccgtttcttttgttcgtcagtcatggtccgccctcaccagttgttcgtatcggtgtcggacgaactgaaatcgcaagagctgccggtatcggtccagccgctgtccgtgtcgctgctgccgaagcacggcgaggggtccgcgaacgccgcagacggcgtatccggccgcagcgcatcgcccagcatggccccggtcagcgagccgccggccaggtagcccagcatggtgctgttggtcgccccggccaccagggccgacgtgacgaaatcgccgtcattccctctggattgttcgctgctcggcggggcagtgcgccgcgccggcggcgtcgtggatggctcgggttggctggcctgcgacggccggcgaaaggtgcgcagcagctcgttatcgaccggctgcggcgtcggggccgccgccttgcgctgcggtcggtgttccttcttcggctcgcgcagcttgaacagcatgatcgcggaaaccagcagcaacgccgcgcctacgcctcccgcgatgtagaacagcatcggattcattcttcggtcctccttgtagcggaaccgttgtctgtgcggcgcgggtggcccgcgccgctgtctttggggatcagccctcgatgagcgcgaccagtttcacgtcggcaaggttcgcctcgaactcctggccgtcgtcctcgtacttcaaccaggcatagccttccgccggcggccgacggttgaggataaggcgggcagggcgctcgtcgtgctcgacctggacgatggcctttttcagcttgtccgggtccggctccttcgcgcccttttccttggcgtccttaccgtcctggtcgccgtcctcgccgtcctggccgtcgccggcctccgcgtcacgctcggcatcagtctggccgttgaaggcatcgacggtgttgggatcgcggcccttctcgtccaggaactcgcgcagcagcttgaccgtgccgcgcgtgatttcctgggtgtcgtcgtcaagccacgcctcgacttcctccgggcgcttcttgaaggccgtcaccagctcgttcaccacggtcacgtcgcgcacgcggccggtgttgaacgcatcggcgatcttctccggcaggtccagcagcgtgacgtgctgggtgatgaacgccggcgacttgccgatttccttggcgatatcgcctttcttcttgcccttcgccagctcgcggccaatgaagtcggcaatttcgcgcggggtcagctcgttgcgttgcaggttctcgataacctggtcggcttcgttgtagtcgttgtcgatgaacgccgggatggacttcttgccggcccacttcgagccacggtagcggcgggcgccgtgattgatgatatagcggcccggctgctcctggttctcgcgcaccgaaatgggtgacttcaccccgcgctctttgatcgtggcaccgatttccgcgatgctctccggggaaaagccggggttgtcggccgtccgcggctgatgcggatcttcgtcgatcaggtccaggtccagctcgatagggccggaaccgccctgagacgccgcaggagcgtccaggaggctcgacaggtcgccgatgctatccaaccccaggccggacggctgcgccgcgcctgcggcttcctgagcggccgcagcggtgtttttcttggtggtcttggcttgagccgcagtcattgggaaatctccatcttcgtgaacacgtaatcagccagggcgcgaacctctttcgatgccttgcgcgcggccgttttcttgatcttccagaccggcacaccggatgcgagggcatcggcgatgctgctgcgcaggccaacggtggccggaatcatcatcttggggtacgcggccagcagctcggcttggtggcgcgcgtggcgcggattccgcgcatcgaccttgctgggcaccatgccaaggaattgcagcttggcgttcttctggcgcacgttcgcaatggtcgtgaccatcttcttgatgccctggatgctgtacgcctcaagctcgatgggggacagcacatagtcggccgcgaagagggcggccgccaggccgacgccaagggtcggggccgtgtcgatcaggcacacgtcgaagccttggttcgccagggccttgatgttcgccccgaacagctcgcgggcgtcgtccagcgacagccgttcggcgttcgccagtaccgggttggactcgatgagggcgaggcgcgcggcctggccgtcgccggctgcgggtgcggtttcggtccagccgccggcagggacagcgccgaacagcttgcttgcatgcaggccggtagcaaagtccttgagcgtgtaggacgcattgccctgggggtccaggtcgatcacggcaacccgcaagccgcgctcgaaaaagtcgaaggcaagatgcacaagggtcgaagtcttgccgacgccgcctttctggttggccgtgaccaaagttttcatcgtttggtttcctgttttttcttggcgtccgcttcccacttccggacgatgtacgcctgatgttccggcagaaccgccgttacccgcgcgtacccctcgggcaagttcttgtcctcgaacgcggcccacacgcgatgcaccgcttgcgacactgcgcccctggtcagtcccagcgacgttgcgaacgtcgcctgtggcttcccatcgactaagacgccccgcgctatctcgatggtctgctgccccacttccagcccctggatcgcctcctggaactggctttcggtaagccgtttcttcatggataacacccataatttgctccgcgccttggttgaacatagcggtgacagccgccagcacatgagagaagtttagctaaacatttctcgcacgtcaacacctttagccgctaaaactcgtccttggcgtaacaaaacaaaagcccggaaaccgggctttcgtctcttgccgcttatggctctgcacccggctccatcaccaacaggtcgcgcacgcgcttcactcggttgcggatcgacactgccagcccaacaaagccggttgccgccgccgccaggatcgcgccgatgatgccggccacaccggccatcgcccaccaggtcgccgccttccggttccattcctgctggtactgcttcgcaatgctggacctcggctcaccataggctgaccgctcgatggcgtatgccgcttctccccttggcgtaaaacccagcgccgcaggcggcattgccatgctgcccgccgctttcccgaccacgacgcgcgcaccaggcttgcggtccagaccttcggccacggcgagctgcgcaaggacataatcagccgccgacttggctccacgcgcctcgatcagctcttgcactcgcgcgaaatccttggcctccacggccgccatgaatcgcgcacgcggcgaaggctccgcagggccggcgtcgtgatcgccgccgagaatgcccttcaccaagttcgacgacacgaaaatcatgctgacggctatcaccatcatgcagacggatcgcacgaacccgctgaattgaacacgagcacggcacccgcgaccactatgccaagaatgcccaaggtaaaaattgccggccccgccatgaagtccgtgaatgccccgacggccgaagtgaagggcaggccgccacccaggccgccgccctcactgcccggcacctggtcgctgaatgtcgatgccagcacctgcggcacgtcaatgcttccgggcgtcgcgctcgggctgatcgcccatcccgttactgccccgatcccggcaatggcaaggactgccagcgctgccatttttggggtgaggccgttcgcggccgaggggcgcagcccctggggggatgggaggcccgcgttagcgggccgggagggttcgagaagggggggcaccccccttcggcgtgcgcggtcacgcgcacagggcgcagccctggttaaaaacaaggtttataaatattggtttaaaagcaggttaaaagacaggttagcggtggccgaaaaacgggcggaaacccttgcaaatgctggattttctgcctgtggacagcccctcaaatgtcaataggtgcgcccctcatctgtcagcactctgcccctcaagtgtcaaggatcgcgcccctcatctgtcagtagtcgcgcccctcaagtgtcaataccgcagggcacttatccccaggcttgtccacatcatctgtgggaaactcgcgtaaaatcaggcgttttcgccgatttgcgaggctggccagctccacgtcgccggccgaaatcgagcctgcccctcatctgtcaacgccgcgccgggtgagtcggcccctcaagtgtcaacgtccgcccctcatctgtcagtgagggccaagttttccgcgaggtatccacaacgccggcggccgcggtgtctcgcacacggcttcgacggcgtttctggcgcgtttgcagggccatagacggccgccagcccagcggcgagggcaaccagcccggtgagcgtcggaaaggcgctggaagccccgtagcgacgcggagaggggcgagacaagccaagggcgcaggctcgatgcgcagcacgacatagccggttctcgcaaggacgagaatttccctgcggtgcccctcaagtgtcaatgaaagtttccaacgcgagccattcgcgagagccttgagtccacgctagatgagagctttgttgtaggtggaccagttggtgattttgaacttttgctttgccacggaacggtctgcgttgtcgggaagatgcgtgatctgatccttcaactcagcaaaagttcgatttattcaacaaagccacgttgtgtctcaaaatctctgatgttacattgcacaagataaaaatatatcatcatgaacaataaaactgtctgcttacataaacagtaatacaaggggtgttatgagccatattcaacgggaaacgtcttgctcgactctagagctcgttcctcgaggcctcgaggcctcgaggaacggtacctgcggggaagcttacaataatgtgtgttgttaagtcttgttgcctgtcatcgtctgactgactttcgtcataaatcccggcctccgtaacccagctttgggcaagctcacggatttgatccggcggaacgggaatatcgagatgccgggctgaacgctgcagttccagctttccctttcgggacaggtactccagctgattgattatctgctgaagggtcttggttccacctcctggcacaatgcgaatgattacttgagcgcgatcgggcatccaattttctcccgtcaggtgcgtggtcaagtgctacaaggcacctttcagtaacgagcgaccgtcgatccgtcgccgggatacggacaaaatggagcgcagtagtccatcgagggcggcgaaagcctcgccaaaagcaatacgttcatctcgcacagcctccagatccgatcgagggtcttcggcgtaggcagatagaagcatggatacattgcttgagagtattccgatggactgaagtatggcttccatcttttctcgtgtgtctgcatctatttcgagaaagcccccgatgcggcgcaccgcaacgcgaattgccatactatccgaaagtcccagcaggcgcgcttgataggaaaaggtttcatactcggccgatcgcagacgggcactcacgaccttgaacccttcaactttcagggatcgatgctggttgatggtagtctcactcgacgtggctctggtgtgttttgacatagcttcctccaaagaaagcggaaggtctggatactccagcacgaaatgtgcccgggtagacggatggaagtctagccctgctcaatatgaaatcaacagtacatttacagtcaatactgaatatacttgctacatttgcaattgtcttataacgaatgtgaaataaaaatagtgtaacaacgcttttactcatcgataatcacaaaaacatttatacgaacaaaaatacaaatgcactccggtttcacaggataggcgggatcagaatatgcaacttttgacgttttgttctttcaaagggggtgctggcaaaaccaccgcactcatgggcctttgcgctgctttggcaaatgacggtaaacgagtggccctctttgatgccgacgaaaaccggcctctgacgcgatggagagaaaacgccttacaaagcagtactgggatcctcgctgtgaagtctattccgccgacgaaatgccccttcttgaagcagcctatgaaaatgccgagctcgaaggatttgattatgcgttggccgatacgcgtggcggctcgagcgagctcaacaacacaatcatcgctagctcaaacctgcttctgatccccaccatgctaacgccgctcgacatcgatgaggcactatctacctaccgctacgtcatcgagctgctgttgagtgaaaatttggcaattcctacagctgttttgcgccaacgcgtcccggtcggccgattgacaacatcgcaacgcaggatgtcagagacgctagagagccttccagttgtaccgtctcccatgcatgaaagagatgcatttgccgcgatgaaagaacgcggcatgttgcatcttacattactaaacacgggaactgatccgacgatgcgcctcatagagaggaatcttcggattgcgatggaggaagtcgtggtcatttcgaaactgatcagcaaaatcttggaggcttgaagatggcaattcgcaagcccgcattgtcggtcggcgaagcacggcggcttgctggtgctcgacccgagatccaccatcccaacccgacacttgttccccagaagctggacctccagcacttgcctgaaaaagccgacgagaaagaccagcaacgtgagcctctcgtcgccgatcacatttacagtcccgatcgacaacttaagctaactgtggatgcccttagtccacctccgtccccgaaaaagctccaggtttttctttcagcgcgaccgcccgcgcctcaagtgtcgaaaacatatgacaacctcgttcggcaatacagtccctcgaagtcgctacaaatgattttaaggcgcgcgttggacgatttcgaaagcatgctggcagatggatcatttcgcgtggccccgaaaagttatccgatcccttcaactacagaaaaatccgttctcgttcagacctcacgcatgttcccggttgcgttgctcgaggtcgctcgaagtcattttgatccgttggggttggagaccgctcgagctttcggccacaagctggctaccgccgcgctcgcgtcattctttgctggagagaagccatcgagcaattggtgaagagggacctatcggaacccctcaccaaatattgagtgtaggtttgaggccgctggccgcgtcctcagtcaccttttgagccagataattaagagccaaatgcaattggctcaggctgccatcgtccccccgtgcgaaacctgcacgtccgcgtcaaagaaataaccggcacctcttgctgtttttatcagttgagggcttgacggatccgcctcaagtttgcggcgcagccgcaaaatgagaacatctatactcctgtcgtaaacctcctcgtcgcgtactcgactggcaatgagaagttgctcgcgcgatagaacgtcgcggggtttctctaaaaacgcgaggagaagattgaactcacctgccgtaagtttcacctcaccgccagcttcggacatcaagcgacgttgcctgagattaagtgtccagtcagtaaaacaaaaagaccgtcggtctttggagcggacaacgttggggcgcacgcgcaaggcaacccgaatgcgtgcaagaaactctctcgtactaaacggcttagcgataaaatcacttgctcctagctcgagtgcaacaactttatccgtctcctcaaggcggtcgccactgataattatgattggaatatcagactttgccgccagatttcgaacgatctcaagcccatcttcacgacctaaatttagatcaacaaccacgacatcgaccgtcgcggaagagagtactctagtgaactgggtgctgtcggctaccgcggtcactttgaaggcgtggatcgtaaggtattcgataataagatgccgcatagcgacatcgtcatcgataagaagaacgtgtttcaacggctcacctttcaatctaaaatctgaacccttgttcacagcgcttgagaaattttcacgtgaaggatgtacaatcatctccagctaaatgggcagttcgtcagaattgcggctgaccgcggatgacgaaaatgcgaaccaagtatttcaattttatgacaaaagttctcaatcgttgttacaagtgaaacgcttcgaggttacagctactattgattaaggagatcgcctatggtctcgccccggcgtcgtgcgtccgccgcgagccagatctcgcctacttcataaacgtcctcataggcacggaatggaatgatgacatcgatcgccgtagagagcatgtcaatcagtgtgcgatcttccaagctagcaccttgggcgctacttttgacaagggaaaacagtttcttgaatccttggattggattcgcgccgtgtattgttgaaatcgatcccggatgtcccgagacgacttcactcagataagcccatgctgcatcgtcgcgcatctcgccaagcaatatccggtccggccgcatacgcagacttgcttggagcaagtgctcggcgctcacagcacccagcccagcaccgttcttggagtagagtagtctaacatgattatcgtgtggaatgacgagttcgagcgtatcttctatggtgattagcctttcctggggggggatggcgctgatcaaggtcttgctcattgttgtcttgccgcttccggtagggccacatagcaacatcgtcagtcggctgacgacgcatgcgtgcagaaacgcttccaaatccccgttgtcaaaatgctgaaggatagcttcatcatcctgattttggcgtttccttcgtgtctgccactggttccacctcgaagcatcataacgggaggagacttctttaagaccagaaacacgcgagcttggccgtcgaatggtcaagctgacggtgcccgagggaacggtcggcggcagacagatttgtagtcgttcaccaccaggaagttcagtggcgcagagggggttacgtggtccgacatcctgctttctcagcgcgcccgctaaaatagcgatatcttcaagatcatcataagagacgggcaaaggcatcttggtaaaaatgccggcttggcgcacaaatgcctctccaggtcgattgatcgcaatttcttcagtcttcgggtcatcgagccattccaaaatcggcttcagaagaaagcgtagttgcggatccacttccatttacaatgtatcctatctctaagcggaaatttgaattcattaagagcggcggttcctcccccgcgtggcgccgccagtcaggcggagctggtaaacaccaaagaaatcgaggtcccgtgctacgaaaatggaaacggtgtcaccctgattcttcttcagggttggcggtatgttgatggttgccttaagggctgtctcagttgtctgctcaccgttattttgaaagctgttgaagctcatcccgccacccgagctgccggcgtaggtgctagctgcctggaaggcgccttgaacaacactcaagagcatagctccgctaaaacgctgccagaagtggctgtcgaccgagcccggcaatcctgagcgaccgagttcgtccgcgcttggcgatgttaacgagatcatcgcatggtcaggtgtctcggcgcgatcccacaacacaaaaacgcgcccatctccctgttgcaagccacgctgtatttcgccaacaacggtggtgccacgatcaagaagcacgatattgttcgttgttccacgaatatcctgaggcaagacacactttacatagcctgccaaatttgtgtcgattgcggtttgcaagatgcacggaattattgtcccttgcgttaccataaaatcggggtgcggcaagagcgtggcgctgctgggctgcagctcggtgggtttcatacgtatcgacaaatcgttctcgccggacacttcgccattcggcaaggagttgtcgtcacgcttgccttcttgtcttcggcccgtgtcgccctgaatggcgcgtttgctgaccccttgatcgccgctgctatatgcaaaaatcggtgtttcttccggccgtggctcatgccgctccggttcgcccctcggcggtagaggagcagcaggctgaacagcctcttgaaccgctggaggatccggcggcacctcaatcggagctggatgaaatggcttggtgtttgttgcgatcaaagttgacggcgatgcgttctcattcaccttcttttggcgcccacctagccaaatgaggcttaatgataacgcgagaacgacacctccgacgatcaatttctgagaccccgaaagacgccggcgatgtttgtcggagaccagggatccagatgcatcaacctcatgtgccgcttgctgactatcgttattcatcccttcgcccccttcaggacgcgtttcacatcgggcctcaccgtgcccgtttgcggcctttggccaacgggatcgtaagcggtgttccagatacatagtactgtgtggccatccctcagacgccaacctcgggaaaccgaagaaatctcgacatcgctccctttaactgaatagttggcaacagcttccttgccatcaggattgatggtgtagatggagggtatgcgtacattgcccggaaagtggaataccgtcgtaaatccattgtcgaagacttcgagtggcaacagcgaacgatcgccttgggcgacgtagtgccaattactgtccgccgcaccaagggctgtgacaggctgatccaataaattctcagctttccgttgatattgtgcttccgcgtgtagtctgtccacaacagccttctgttgtgcctcccttcgccgagccgccgcatcgtcggcggggtaggcgaattggacgctgtaatagagatcgggctgctctttatcgaggtgggacagagtcttggaacttatactgaaaacataacggcgcatcccggagtcgcttgcggttagcacgattactggctgaggcgtgaggacctggcttgccttgaaaaatagataatttccccgcggtagggctgctagatctttgctatttgaaacggcaaccgctgtcaccgtttcgttcgtggcgaatgttacgaccaaagtagctccaaccgccgtcgagaggcgcaccacttgatcgggattgtaagccaaataacgcatgcgcggatctagcttgcccgccattggagtgtcttcagcctccgcaccagtcgcagcggcaaataaacatgctaaaatgaaaagtgcttttctgatcatggttcgctgtggcctacgtttgaaacggtatcttccgatgtctgataggaggtgacaaccagacctgccgggttggttagtctcaatctgccgggcaagctggtcaccttttcgtagcgaactgtcgcggtccacgtactcaccacaggcattttgccgtcaacgacgagggtccttttatagcgaatttgctgcgtgcttggagttacatcatttgaagcgatgtgctcgacctccaccctgccgcgtttgccaagaatgacttgaggcgaactgggattgggatagttgaagaattgctggtaatcctggcgcactgttggggcactgaagttcgataccaggtcgtaggcgtactgagcggtgtcggcatcataactctcgcgcaggcgaacgtactcccacaatgaggcgttaacgacggcctcctcttgagttgcaggcaatcgcgagacagacacctcgctgtcaacggtgccgtccggccgtatccatagatatacgggcacaagcctgctcaacggcaccattgtggctatagcgaacgcttgagcaacatttcccaaaatcgcgatagctgcgacagctgcaatgagtttggagagacgtcgcgccgatttcgctcgcgcggtttgaaaggcttctacttccttatagtgctcggcaaggctttcgcgcgccactagcatggcatattcaggccccgtcatagcgtccacccgaattgccgagctgaagatctgacggagtaggctgccatcgccccacattcagcgggaagatcgggcctttgcagctcgctaatgtgtcgtttgtctggcagccgctcaaagcgacaactaggcacagcaggcaatacttcatagaattctccattgaggcgaatttttgcgcgacctagcctcgctcaacctgagcgaagcgacggtacaagctgctggcagattgggttgcgccgctccagtaactgcctccaatgttgccggcgatcgccggcaaagcgacaatgagcgcatcccctgtcagaaaaaacatatcgagttcgtaaagaccaatgatcttggccgcggtcgtaccggcgaaggtgattacaccaagcataagggtgagcgcagtcgcttcggttaggatgacgatcgttgccacgaggtttaagaggagaagcaagagaccgtaggtgataagttgcccgatccacttagctgcgatgtcccgcgtgcgatcaaaaatatatccgacgaggatcagaggcccgatcgcgagaagcactttcgtgagaattccaacggcgtcgtaaactccgaaggcagaccagagcgtgccgtaaaggacccactgtgccccttggaaagcaaggatgtcctggtcgttcatcggaccgatttcggatgcgattttctgaaaaacggcctgggtcacggcgaacattgtatccaactgtgccggaacagtctgcagaggcaagccggttacactaaactgctgaacaaagtttgggaccgtcttttcgaagatggaaaccacatagtcttggtagttagcctgcccaacaattagagcaacaacgatggtgaccgtgatcacccgagtgataccgctacgggtatcgacttcgccgcgtatgactaaaataccctgaacaataatccaaagagtgacacaggcgatcaatggcgcactcaccgcctcctggatagtctcaagcatcgagtccaagcctgtcgtgaaggctacatcgaagatcgtatgaatggccgtaaacggcgccggaatcgtgaaattcatcgattggacctgaacttgactggtttgtcgcataatgttggataaaatgagctcgcattcggcgaggatgcgggcggatgaacaaatcgcccagccttaggggagggcaccaaagatgacagcggtcttttgatgctccttgcgttgagcggccgcctcttccgcctcgtgaaggccggcctgcgcggtagtcatcgttaataggcttgtcgcctgtacattttgaatcattgcgtcatggatctgcttgagaagcaaaccattggtcacggttgcctgcatgatattgcgagatcgggaaagctgagcagacgtatcagcattcgccgtcaagcgtttgtccatcgtttccagattgtcagccgcaatgccagcgctgtttgcggaaccggtgatctgcgatcgcaacaggtccgcttcagcatcactacccacgactgcacgatctgtatcgctggtgatcgcacgtgccgtggtcgacattggcattcgcggcgaaaacatttcattgtctaggtccttcgtcgaaggatactgatttttctggttgagcgaagtcagtagtccagtaacgccgtaggccgacgtcaacatcgtaaccatcgctatagtctgagtgagattctccgcagtcgcgagcgcagtcgcgagcgtctcagcctccgttgccgggtcgctaacaacaaactgcgcccgcgcgggctgaatatatagaaagctgcaggtcaaaactgttgcaataagttgcgtcgtcttcatcgtttcctaccttatcaatcttctgcctcgtggtgacgggccatgaattcgctgagccagccagatgagttgccttcttgtgcctcgcgtagtcgagttgcaaagcgcaccgtgttggcacgccccgaaagcacggcgacatattcacgcatatcccgcagatcaaattcgcagatgacgcttccactttctcgtttaagaagaaacttacggctgccgaccgtcatgtcttcacggatcgcctgaaattccttttcggtacatttcagtccatcgacataagccgatcgatctgcggttggtgatggatagaaaatcttcgtcatacattgcgcaaccaagctggctcctagcggcgattccagaacatgctctggttgctgcgttgccagtattagcatcccgttgttttttcgaacggtcaggaggaatttgtcgacgacagtcgaaaatttagggtttaacaaataggcgcgaaactcatcgcagctcatcacaaaacggcggccgtcgatcatggctccaatccgatgcaggagatatgctgcagcgggagcgcatacttcctcgtattcgagaagatgcgtcatgtcgaagccggtaatcgacggatctaactttacttcgtcaacttcgccgtcaaatgcccagccaagcgcatggccccggcaccagcgttggagccgcgctcctgcgccttcggcgggcccatgcaacaaaaattcacgtaaccccgcgattgaacgcatttgtggatcaaacgagagctgacgatggataccacggaccagacggcggttctcttccggagaaatcccaccccgaccatcactctcgatgagagccacgatccattcgcgcagaaaatcgtgtgaggctgctgtgttttctaggccacgcaacggcgccaacccgctgggtgtgcctctgtgaagtgccaaatatgttcctcctgtggcgcgaaccagcaattcgccaccccggtccttgtcaaagaacacgaccgtacctgcacggtcgaccatgctctgttcgagcatggctagaacaaacatcatgagcgtcgtcttacccctcccgataggcccgaatattgccgtcatgccaacatcgtgctcatgcgggatatagtcgaaaggcgttccgccattggtacgaaatcgggcaatcgcgttgccccagtggcctgagctggcgccctctggaaagttttcgaaagagacaaaccctgcgaaattgcgtgaagtgattgcgccagggcgtgtgcgccacttaaaattccccggcaattgggaccaataggccgcttccataccaataccttcttggacaaccacggcacctgcatccgccattcgtgtccgagcccgcgcgcccctgtccccaagactattgagatcgtctgcatagacgcaaaggctcaaatgatgtgagcccataacgaattcgttgctcgcaagtgcgtcctcagcctcggataatttgccgatttgagtcacggctttatcgccggaactcagcatctggctcgatttgaggctaagtttcgcgtgcgcttgcgggcgagtcaggaacgaaaaactctgcgtgagaacaagtggaaaatcgagggatagcagcgcgttgagcatgcccggccgtgtttttgcagggtattcgcgaaacgaatagatggatccaacgtaactgtcttttggcgttctgatctcgagtcctcgcttgccgcaaatgactctgtcggtataaatcgaagcgccgagtgagccgctgacgaccggaaccggtgtgaaccgaccagtcatgatcaaccgtagcgcttcgccaatttcggtgaagagcacaccctgcttctcgcggatgccaagacgatgcaggccatacgctttaagagagccagcgacaacatgccaaagatcttccatgttcctgatctggcccgtgagatcgttttccctttttccgcttagcttggtgaacctcctctttaccttccctaaagccgcctgtgggtagacaatcaacgtaaggaagtgttcattgcggaggagttggccggagagcacgcgctgttcaaaagcttcgttcaggctagcggcgaaaacactacggaagtgtcgcggcgccgatgatggcacgtcggcatgacgtacgaggtgagcatatattgacacatgatcatcagcgatattgcgcaacagcgtgttgaacgcacgacaacgcgcattgcgcatttcagtttcctcaagctcgaatgcaacgccatcaattctcgcaatggtcatgatcgatccgtcttcaagaaggacgatatggtcgctgaggtggccaatataagggagatagatctcaccggatctttcggtcgttccactcgcgccgagcatcacaccattcctctccctcgtgggggaaccctaattggatttgggctaacagtagcgcccccccaaactgcactatcaatgcttcttcccgcggtccgcaaaaatagcaggacgacgctcgccgcattgtagtctcgctccacgatgagccgggctgcaaaccataacggcacgagaacgacttcgtagagcgggttctgaacgataacgatgacaaagccggcgaacatcatgaataaccctgccaatgtcagtggcaccccaagaaacaatgcgggccgtgtggctgcgaggtaaagggtcgattcttccaaacgatcagccatcaactaccgccagtgagcgtttggccgaggaagctcgccccaaacatgataacaatgccgccgacgacgccggcaaccagcccaagcgaagcccgcccgaacatccaggagatcccgatagcgacaatgccgagaacagcgagtgactggccgaacggaccaaggataaacgtgcatatattgttaaccattgtggcggggtcagtgccgccacccgcagattgcgctgcggcgggtccggatgaggaaatgctccatgcaattgcaccgcacaagcttggggcgcagctcgatatcacgcgcatcatcgcattcgagagcgagaggcgatttagatgtaaacggtatctctcaaagcatcgcatcaatgcgcacctccttagtataagtcgaataagacttgattgtcgtctgcggatttgccgttgtcctggtgtggcggtggcggagcgattaaaccgccagcgccatcctcctgcgagcggcgctgatatgacccccaaacatcccacgtctcttcggattttagcgcctcgtgatcgtcttttggaggctcgattaacgcgggcaccagcgattgagcagctgtttcaacttttcgcacgtagccgtttgcaaaaccgccgatgaaattaccggtgttgtaagcggagatcgcccgacgaagcgcaaattgcttctcgtcaatcgtttcgccgcctgcataacgacttttcagcatgtttgcagcggcagataatgatgtgcacgcctggagcgcaccgtcaggtgtcagaccgagcatagaaaaatttcgagagtttatttgcatgaggccaacatccagcgaatgccgtgcatcgagacggtgcctgacgacttgggttgcttggctgtgatcttgccagtgaagcgtttcgccggtcgtgttgtcatgaatcgctaaaggatcaaagcgactctccaccttagctatcgccgcaagcgtagatgtcgcaactgatggggcacacttgcgagcaacatggtcaaactcagcagatgagagtggcgtggcaaggctcgacgaacagaaggagaccatcaaggcaagagaaagcgaccccgatctcttaagcataccttatctccttagctcgcaactaacaccgcctctcccgttggaagaagtgcgttgttttatgttgaagattatcgggagggtcggttactcgaaaattttcaattgcttctttatgatttcaattgaagcgagaaacctcgcccggcgtcttggaacgcaacatggaccgagaaccgcgcatccatgactaagcaaccggatcgacctattcaggccgcagttggtcaggtcaggctcagaacgaaaatgctcggcgaggttacgctgtctgtaaacccattcgatgaacgggaagcttccttccgattgctcttggcaggaatattggcccatgcctgcttgcgctttgcaaatgctcttatcgcgttggtatcatatgccttgtccgccagcagaaacgcactctaagcgattatttgtaaaaatgtttcggtcatgcggcggtcatgggcttgacccgctgtcagcgcaagacggatcggtcaaccgtcggcatcgacaacagcgtgaatcttggtggtcaaaccgccacgggaacgtcccatacagccatcgtcttgatcccgctgtttcccgtcgccgcatgttggtggacgcggacacaggaactgtcaatcatgacgacattctatcgaaagccttggaaatcacactcagaatatgatcccagacgtctgcctcacgccatcgtacaaagcgattgtagcaggttgtacaggaaccgtatcgatcaggaacgtctgcccagggcgggcccgtccggaagcgccacaagatgacattgatcacccgcgtcaacgcgcggcacgcgacgcggcttatttgggaacaaaggactgaacaacagtccattcgaaatcggtgacatcaaagcggggacgggttatcagtggcctccaagtcaagcctcaatgaatcaaaatcagaccgatttgcaaacctgatttatgagtgtgcggcctaaatgatgaaatcgtccttctagatcgcctccgtggtgtagcaacacctcgcagtatcgccgtgctgaccttggccagggaattgactggcaagggtgctttcacatgaccgctcttttggccgcgatagatgatttcgttgctgctttgggcacgtagaaggagagaagtcatatcggagaaattcctcctggcgcgagagcctgctctatcgcgacggcatcccactgtcgggaacagaccggatcattcacgaggcgaaagtcgtcaacacatgcgttataggcatcttcccttgaaggatgatcttgttgctgccaatctggaggtgcggcagccgcaggcagatgcgatctcagcgcaacttgcggcaaaacatctcactcacctgaaaaccactagcgagtctcgcgatcagacgaaggccttttacttaacgacacaatatccgatgtctgcatcacaggcgtcgctatcccagtcaatactaaagcggtgcaggaactaaagattactgatgacttaggcgtgccacgaggcctgagacgacgcgcgtagacagttttttgaaatcattatcaaagtgatggcctccgctgaagcctatcacctctgcgccggtctgtcggagagatgggcaagcattattacggtcttcgcgcccgtacatgcattggacgattgcagggtcaatggatctgagatcatccagaggattgccgcccttaccttccgtttcgagttggagccagcccctaaatgagacgacatagtcgacttgatgtgacaatgccaagagagagatttgcttaacccgatttttttgctcaagcgtaagcctattgaagcttgccggcatgacgtccgcgccgaaagaatatcctacaagtaaaacattctgcacaccgaaatgcttggtgtagacatcgattatgtgaccaagatccttagcagtttcgcttggggaccgctccgaccagaaataccgaagtgaactgacgccaatgacaggaatcccttccgtctgcagataggtaccatcgatagatctgctgcctcgcgcgtttcggtgatgacggtgaaaacctctgacacatgcagctcccggagacggtcacagcttgtctgtaagcggatgccgggagcagacaagcccgtcagggcgcgtcagcgggtgttggcgggtgtcggggcgcagccatgacccagtcacgtagcgatagcggagtgtatactggcttaactatgcggcatcagagcagattgtactgagagtgcaccatatgcggtgtgaaataccgcacagatgcgtaaggagaaaataccgcatcaggcgctcttccgcttcctcgctcactgactcgctgcgctcggtcgttcggctgcggcgagcggtatcagctcactcaaaggcggtaatacggttatccacagaatcaggggataacgcaggaaagaacatgtgagcaaaaggccagcaaaaggccaggaaccgtaaaaaggccgcgttgctggcgtttttccataggctccgcccccctgacgagcatcacaaaaatcgacgctcaagtcagaggtggcgaaacccgacaggactataaagataccaggcgtttccccctggaagctccctcgtgcgctctcctgttccgaccctgccgcttaccggatacctgtccgcctttctcccttcgggaagcgtggcgctttctcatagctcacgctgtaggtatctcagttcggtgtaggtcgttcgctccaagctgggctgtgtgcacgaaccccccgttcagcccgaccgctgcgccttatccggtaactatcgtcttgagtccaacccggtaagacacgacttatcgccactggcagcagccactggtaacaggattagcagagcgaggtatgtaggcggtgctacagagttcttgaagtggtggcctaactacggctacactagaaggacagtatttggtatctgcgctctgctgaagccagttaccttcggaaaaagagttggtagctcttgatccggcaaacaaaccaccgctggtagcggtggtttttttgtttgcaagcagcagattacgcgcagaaaaaaaggatctcaagaagatcctttgatcttttctacggggtctgacgctcagtggaacgaaaactcacgttaagggattttggtcatgagattatcaaaaaggatcttcacctagatccttttaaattaaaaatgaagttttaaatcaatctaaagtatatatgagtaaacttggtctgacagttaccaatgcttaatcagtgaggcacctatctcagcgatctgtctatttcgttcatccatagttgcctgactccccgtcgtgtagataactacgatacgggagggcttaccatctggccccagtgctgcaatgataccgcgagacccacgctcaccggctccagatttatcagcaataaaccagccagccggaagggccgagcgcagaagtggtcctgcaactttatccgcctccatccagtctattaattgttgccgggaagctagagtaagtagttcgccagttaatagtttgcgcaacgttgttgccattgctgcaggggggggggggggggggttccattgttcattccacggacaaaaacagagaaaggaaacgacagaggccaaaaagctcgctttcagcacctgtcgtttcctttcttttcagagggtattttaaataaaaacattaagttatgacgaagaagaacggaaacgccttaaaccggaaaattttcataaatagcgaaaacccgcgaggtcgccgccccgtaacct

SEQ ID NO: 20 - DNA, 58032 bp, artificial
  PHP39308
gtcggatcaccggaaaggacccgtaaagtgataatgattatcatctacatatcacaacgtgcgtggaggccatcaaaccacgtcaaataatcaattatgacgcaggtatcgtattaattgatctgcatcaacttaacgtaaaaacaacttcagacaatacaaatcagcgacactgaatacggggcaacctcatgtcccccccccccccccccctgcaggcatcgtggtgtcacgctcgtcgtttggtatggcttcattcagctccggttcccaacgatcaaggcgagttacatgatcccccatgttgtgcaaaaaagcggttagctccttcggtcctccgatcgttgtcagaagtaagttggccgcagtgttatcactcatggttatggcagcactgcataattctcttactgtcatgccatccgtaagatgcttttctgtgactggtgagtactcaaccaagtcattctgagaatagtgtatgcggcgaccgagttgctcttgcccggcgtcaacacgggataataccgcgccacatagcagaactttaaaagtgctcatcattggaaaacgttcttcggggcgaaaactctcaaggatcttaccgctgttgagatccagttcgatgtaacccactcgtgcacccaactgatcttcagcatcttttactttcaccagcgtttctgggtgagcaaaaacaggaaggcaaaatgccgcaaaaaagggaataagggcgacacggaaatgttgaatactcatactcttcctttttcaatattattgaagcatttatcagggttattgtctcatgagcggatacatatttgaatgtatttagaaaaataaacaaataggggttccgcgcacatttccccgaaaagtgccacctgacgtctaagaaaccattattatcatgacattaacctataaaaataggcgtatcacgaggccctttcgtcttcaagaattggtcgacgatcttgctgcgttcggatattttcgtggagttcccgccacagacccggattgaaggcgagatccagcaactcgcgccagatcatcctgtgacggaactttggcgcgtgatgactggccaggacgtcggccgaaagagcgacaagcagatcacgcttttcgacagcgtcggatttgcgatcgaggatttttcggcgctgcgctacgtccgcgaccgcgttgagggatcaagccacagcagcccactcgaccttctagccgacccagacgagccaagggatctttttggaatgctgctccgtcgtcaggctttccgacgtttgggtggttgaacagaagtcattatcgtacggaatgccaagcactcccgaggggaaccctgtggttggcatgcacatacaaatggacgaacggataaaccttttcacgcccttttaaatatccgttattctaataaacgctcttttctcttaggtttacccgccaatatatcctgtcaaacactgatagtttaaactgaaggcgggaaacgacaatctgatcatgagcggagaattaagggagtcacgttatgacccccgccgatgacgcgggacaagccgttttacgtttggaactgacagaaccgcaacgttgaaggagccactcagcaagctggtacgattgtaatacgactcactatagggcgaattgagcgctgtttaaacgctcttcaactggaagagcggttaccagagctggtcacctttgtccaccaagatggaactgcggccgctcattaattaagtcaggcgcgcctctagttgaagacacgttcatgtcttcatcgtaagaagacactcagtagtcttcggccagaatggccatctggattcagcaggcctagaaggccatttaaatcctgaggatctggtcttcctaaggacccgggatatcgctatcaactttgtatagaaaagttgggccgaattcgagctcggtacggccagaatggcccggaccgggttaccgaattcgagctcggtaccctgggatccgagctctcccatatggtcgacctgcaggcggccgcgaattcactagtaacggccgccagtgtgctggaattcgcccttgagctccctttaatctggcgctagatctgcatccgcggcttgcaaagataaatggcacatttagtgtgttattttgcaatacctttcatagtagatatccttaaatgcagttttaggcatgtttgggtaattaaataacatttttaggaggagttttagatttacctttctttcgtgatgactgatgacagacgtggggaattcaaatgcaactctagcgaaagttcatatatttttcataaatagctgaggctggggtaattattttttgtagaaaaatagaataggtggaatggtttggggaaggcgtaggcgctcgtggacgacgccccataaaagacaagaggcggaattgccatgaattcgaggtagctaagtaaggcgcatatatatgccaaaaattctactgtcactttccaatttcaatgcgctgccaaacaagccgccgacccatggatactgacttgaattcagcccaattctgtagatccaaacagggccggcgtcagtgcctcaggtgagagagcagcagacgatgcaaagagccaaaagtggaagcagacgcagccgaagccgaagcccaagcccaaaactgttttgtctttgcccagaaccgcgacgagcctaaactgccgcttcctcctatctacaagtccctggcacatcacgcatagtccaaccatggcgcgcaggcgataaggcgcgccacggggacgcgacatgtggtggcggacgcgatcaggatagggccaggctggccgggcgcggccacgggagaacggtggccactcgtcccacatccgcttcgtcctgtcctgtactgcgtcctgcccccaacgagagccggagccggccatcccgtcgcacactctccccctctatatatgccgtcggtgtgggggagcctactacaggacgacccaagcaagcaagcaagcagcgagtacatacatactaggcagccaggcagtcaagcttatggcggccgccttctcctccaccgtcggagctccggtgggtgaccgcgcgtgttaattccaagcatctgctagctgctctgctactagttcagcgtcgggatcttcttcttcatgcatgcatttcatgatcatatatatatctcgatccttgagaccttcttgacggcatatatatgtatatgtacatgcatcatgcatcgaccgatcatcaggcctccaccccgaccaggagcagcttcctcgggaagaagctcaacaagccgcaggtgtcgtccgcggccgtgacctatcatggcaagagctccagcagcaacagcaggttcaaggccatggctgccaaggaagtcgatgaaacaaaacaatcggaccaggatcgttggaaaggcctggcctacgacatctcggacgaccagcaggacatcaccaggggcaagggcctcgtcgacaacctcttccaggcgcctaccggggacggcacccacgtcgccgtgctcagctcctacgactacatcagccagggccaaaagacctacaacttcgacaacatgatggatggcttctacatatccaagagcttcatggacaagctcgtcgtccatttgagcaaaaattttatgtccctgccaaacatcaaggttcccctcatcctgggtatctggggaggcaaaggccagggaaaatcgttccaatgcgagctggtcttctccaagatgggcatcatgtacgttaatttatttcgattcgtctattattattgtcttcgataatatatactagctagctagtagtaaatcattccaatgcatgcatgcatgcagccccatcatgatgagcgccggcgagctggagagcggcaacgccggagagcccgccaagctcatcaggcagcgctaccgtgaggccgccgacctgatcaagaagggcaagatgtcctgcctcttcatcaacgacctcgacgccggcgcgggtcgcatgggcggcaccacccagtacacggtgaacaaccagatggtcaacgccaccctgatgaacatcgccgacaaccccaccaacgtgcggctcccggggatgtacaacaaggaggacaacccccgcgtgcccatcatcgtcaccggcaacgacttctccacgctctacgcgccgctcatccgcgacggccgcatggagaagttctactgggcgcccacccgcgaggaccgcatcggcatctgcaagggcatcttccgcaccgacggcgtcgacgaggagcacgtcgtccgtctggtcgacaccttccctggccagtccatcgacttcttcggcgcgctgcgtgcccgggtctacgacgacgaggtccgaaagtgggtgagcgagaccggcgtcgagaacatcgccaagaagctcgtcaactccaaggagggcccgcccacgttcgagcagcccaagatgacgatcgagaagctcttggagtacggacacatgctggtggcggagcaggagaacgtcaagcgtgtgcagcttgctgacaagtacctcaacgaggctgctcttggtgaagccaacgaggacgccatgaagactggctccttcttcaagtagatcgatagacttgtccatcttctggattggccaacttaattaatgtatgaaataaaaggatgcacacatagtgacatgctaatcactataatgtgggcatcaaagttgtgtgttatgtgtaattactagttatctgaataaaagagaaagagatcatccatatttcttatcctaaatgaatgtcacgtgtctttataattctttgatgaaccagatgcatttcattaaccaaatccatatacatataaatattaatcatatataattaatatcaattgggttagcaaaacaaatctagtctaggtgtgttttgcgaatgcggcctcaagtttgtacaaaaaagcaggctccggccagaatggcccggaccgggttaccgaattcgagctcggtaccaggtttttgtgatctgatgataagtggttggttcgtgtctcatgcacttgggaggtgatctatttcacctggtgtagtttgtgtttccgtcagttggaaaaacttatccctatcgatttcgttttcattttctgcttttcttttatgtaccttcgtttgggcttgtaacgggcctttgtatttcaactctcaataataatccaagtgcatgttaaacaatttgtcatctgtttcggctttgatatactactggtgaagatgggccgtactactgcatcacaacgaaaaataataataagatgaaaaacttgaagtggaaaaaaaaaaaaacttgaatgttcactactactcattgaccataatgtttaacatacatagctcaatagtatttttgtgaatatggcaacacaaacagtccaaaacaattgtctcttactataccaaaccaagggcgccgcttgtttgccactctttgtgtgcaatagtgtgattaccacatctccacattcaatatattccctgaattatctgacgattttgatggctcactgttttcccaagtcttgaattgtcttctgtgcgccagtcaaatgcatatgtgttgagtttatcttttaaatatcaagcttttgtttttaacttttgtttgtaaccaaaaactcacagtaggagtttgatcacataattttatgtttgcctttgcaatttctagtgagtctttgattaaaagcttgaaaagaaaatgcagccaagcttaccaagtaagttatgtgtattaaccagaggaagagagaatcttgcaaaatttcaacaaacacaaaaagaagtattactacgattggtggagaaagaaaacgattccaaatcttgaactgttgttgtaaaagcatagcagaaagtgggagacaaccgaaatagaaatgactataacttaatttaatgttatcattataatttcttctagcaaatatttagaaagtaaatatcacatcaacctttaatgtaattaagctttctctttttgattcatgtgagatgaaaagaaaaaaaagaagagaaaagtgtagaaaacacatcatttctaagctgaaggtacatagtacccttgtacttttggtttcacctgcatagagaaaacccacaagaatatgacagtctgatttgtcagtctcattctcaagcaacatttctctatccgttactttcatggtgaataacacaatccatcatcaatactttgtgttactcagaaactgaaagttattccgagtcttgcatatctttggacctactcgtttttctaccattattgctgattgttaagctctcgctacttgaatcggcattgttggagtgggaaggttcaaaaaattggagttatgactagttgtctctttctatgtacgatggagaaaatgaataaacaactgagaaaatggctcttgtttagttgatgatgctcttaagctttccactggttgccatatatgatttgggcatttcactttgatcttaatgggccttgtaaagcccaagactcatgattatctttagttgatgctcttaattaggtgtgggcaaataattcaaactgtatgtacccgaccaaaaccaaagcaaaaataatcgaaccaaaccgaaaatttaaaaataaccgaatgaaaactaaatcctataactgaaagaactgaaaccgaatcaaaatatttaatgtaaccaaaaatatccgaaatataattatattgtcaaaaatattaataatttctagattaaataattaaaaatacttaaaaatttatataaaatagtaaaaatactcgaaaataaccacaaatattcaaaaacaaccgaaatatcccaaaatattcaaagcaaaataaccgaatggataccaaattttaaaaccgaaaaaactggaacaaaaccaaaatcgaaccaaaatttcaaaaatcgaataaatactaaactttagaacaaaaaaaaacgataaccgaatgtatacgaaccaaagccgaattagataaccgaacgtccaggactactcttaatctttccgccacttatgatttgggctattactttgtttataatgagccttttcaagctcaagttcatgattgtccgtgagatgagaaactgacttgttggattcgaaaccctagctagtattggttaatacttaatacataaatgacctgcattgacatcatcatccaagaaaataaaaattgtatgcttgagatatttagttttcctagctaggttttctttattttagtaccgaatctttaggtgtgccacgttaatttagacccattttttcatacttaccaactgagtctagtttaatcatgactataatcgtataaaatgattcagtcgacgtcattgcgaacgtatataaaatcatccaaattgacgtcattccaaagaggtaagcatgcttatctaagagtccgagcatactaaacaagacgacattttatttgcactccaaatcaaattttgtattgcctaaagaaaaacaatcaaactcaagtttcttaaaattaatttcattcaaactaatcactttcaatatctcacatattattcatgccatttctatttgtctaaacatgatttaaaaaaaaaagtaaaatacaaagattactatgcaaaaactctataaaaaaaaattcaaatttcttatttatttgtgacatcaaattttcaaaataatttttttaattatcggttgatccggtcagtcgataaaaacataaactttcagcgaccgttaaaactttcctactaccgatttagagaaaatcttagcttgaaacgtaattgtaacctgccttcatgcaagtcgcaagatatgtcatcctaagttgtatatgttttctcaaaagatgtatttacttgagaaaatacgtttcaacgttgatggacaaccaattaagaatcaagcacctttcgtaatcaatttaggcttatcgtctaaggtatactgatttacgacagttgactagacttataaggaacaaaataatagaataatttcgtcaagaaaaattgattttggactcatactttacataatattttactcttaaatttatttaagtggctcctcgcatgatcccaaagagcaagcctagactatatggaaaagtttctaaacacttcacctaatcatagagactaagatggtaattcgtaaacgacaaagcctagtgacactgtccattgtaaaattccacatcatattagtattaaacatatacatgtagtttcctgaacacatgtagtatcaaacacacttcgtggcttcttcctcgaaacctggtaccctgggatctgtgcagcgtgacccggtcgtgcccctctctagagataatgagcattgcatgtctaagttataaaaaattaccacatattttttttgtcacacttgtttgaagtgcagtttatctatctttatacatatatttaaactttactctacgaataatataatctatagtactacaataatatcagtgttttagagaatcatataaatgaacagttagacatggtctaaaggacaattgagtattttgacaacaggactctacagttttatctttttagtgtgcatgtgttctcctttttttttgcaaatagcttcacctatataatacttcatccattttattagtacatccatttagggtttagggttaatggtttttatagactaatttttttagtacatctattttattctattttagcctctaaattaagaaaactaaaactctattttagtttttttatttaataatttagatataaaatagaataaaataaagtgactaaaaattaaacaaataccctttaagaaattaaaaaaactaaggaaacatttttcttgtttcgagtagataatgccagcctgttaaacgccgtcgacgagtctaacggacaccaaccagcgaaccagcagcgtcgcgtcgggccaagcgaagcagacggcacggcatctctgtcgctgcctctggacccctctcgagagttccgctccaccgttggacttgctccgctgtcggcatccagaaattgcgtggcggagcggcagacgtgagccggcacggcaggcggcctcctcctcctctcacggcaccggcagctacgggggattcctttcccaccgctccttcgctttcccttcctcgcccgccgtaataaatagacaccccctccacaccctctttccccaacctcgtgttgttcggagcgcacacacacacaaccatatctcccccaaatccacccgtcggcacctccgcttcaaggtacgccgctcgtcctcccccccccccctctctaccttctctagatcggcgttccggtccatgcatggttagggcccggtagttctacttctgttcatgtttgtgttagatccgtgtttgtgttagatccgtgctgctagcgttcgtacacggatgcgacctgtacgtcagacacgttctgattgctaacttgccagtgtttctctttggggaatcctgggatggctctagccgttccgcagacgggatcgatttcatgattttttttgtttcgttgcatagggtttggtttgcccttttcctttatttcaatatatgccgtgcacttgtttgtcgggtcatcttttcatgcttttttttgtcttggttgtgatgatgtggtctggttgggcggtcgttctagatcggagtagaattctgtttcaaactacctggtggatttattaattttggatctgtatgtgtgtgccatacatattcatagttacgaattgaagatgatggatggaaatatcgatctaggataggtatacatgttgatgcgggttttactgatgcatatacagagatgctttttgttcgcttggttgtgatgatgtggtgtggttgggcggtcgttcattcgttctagatcggagtagaatactgtttcaaactacctggtgtatttattaattttggaactgtatgtgtgtgtcatacatcttcatagttacgagtttaagatggatggaaatatcgatctaggataggtatacatgttgatgtgggttttactgatgcatatacatgatggcatatgcagcatctattcatatgctctaaccttgagtacctatctattataataaacaagtatgttttataattattttgatcttgatatacttggatgatggcatatgcagcagctatatgtggatttttttagccctgccttcatacgctatttatttgcttggtactgtttcttttgtcgatgctcaccctgttgtttggtgttacttctgcagggatccgtcccccagatttgctaggacaccaccgtacccacaccccggatcagttaatatcgtagacataatggccctccctgccatctctgcttcgtctcgtccacctcatcatgcatgcagcaggctgtgctgtggacctgatcgagtttcaattgatccaagcaagcaagagggaggtggactagacgaagcagaaattgcagagagagaccagtcgttgatcggtcggagatctccccgaatcgatctcgatcggccggaattttgggggccggccgggaggtggatgatggggggtgattaccatctaggcggcgccgtgttggatgatgtaccaacatatcactataggctactttgggaacctcagatccccttcgggattggaggaaattgagatggaaatgaactaatttcttctctaacccccttcaatcacgaaggggattcgagtttccaaactagccctatatatatcagagctagggagggatattgctgcaacatgcatcacgaggtacagatatataattagggttctgctgcaatgttttgactatagatcgttagtgatctgctgtaattaataataatggtgatctcgaagcaattctaaacatcatagtagcaggcccaccatggagacttgtccatcttctggattggccaacttaattaatgtatgaaataaaaggatgcacacatagtgacatgctaatcactataatgtgggcatcaaagttgtgtgttatgtgtaattactagttatctgaataaaagagaaagagatcatccatatttcttatcctaaatgaatgtcacgtgtctttataattctttgatgaaccagatgcatttcattaaccaaatccatatacatataaatattaatcatatataattaatatcaattgggttagcaaaacaaatctagtctaggtgtgttttgcgaatgcggcccccgggcacccagctttcttgtacaaagtggccgttaacggatcggccagaatggcccggaccgaagctggccgctctagaactagtggatctcgatgtgtagtctacgagaagggttaaccgtctcttcgtgagaataaccgtggcctaaaaataagccgatgaggataaataaaatgtggtggtacagtacttcaagaggtttactcatcaagaggatgcttttccgatgagctctagtagtacatcggacctcacatacctccattgtggtgaaatattttgtgctcatttagtgatgggtaaattttgtttatgtcactctaggttttgacatttcagttttgccactcttaggttttgacaaataatttccattccgcggcaaaagcaaaacaattttattttacttttaccactcttagctttcacaatgtatcacaaatgccactctagaaattctgtttatgccacagaatgtgaaaaaaaacactcacttatttgaagccaaggtgttcatggcatggaaatgtgacataaagtaacgttcgtgtataagaaaaaattgtactcctcgtaacaagagacggaaacatcatgagacaatcgcgtttggaaggctttgcatcacctttggatgatgcgcatgaatggagtcgtctgcttgctagccttcgcctaccgcccactgagtccgggcggcaactaccatcggcgaacgacccagctgacctctaccgaccggacttgaatgcgctaccttcgtcagcgacgatggccgcgtacgctggcgacgtgcccccgcatgcatggcggcacatggcgagctcagaccgtgcgtggctggctacaaatacgtaccccgtgagtgccctagctagaaacttacacctgcaactgcgagagcgagcgtgtgagtgtagccgagtagatcccccggtcgccaccatggcctcctccgagaacgtcatcaccgagttcatgcgcttcaaggtgcgcatggagggcaccgtgaacggccacgagttcgagatcgagggcgagggcgagggccgcccctacgagggccacaacaccgtgaagctgaaggtgaccaagggcggccccctgcccttcgcctgggacatcctgtccccccagttccagtacggctccaaggtgtacgtgaagcaccccgccgacatccccgactacaagaagctgtccttccccgagggcttcaagtgggagcgcgtgatgaacttcgaggacggcggcgtggcgaccgtgacccaggactcctccctgcaggacggctgcttcatctacaaggtgaagttcatcggcgtgaacttcccctccgacggccccgtgatgcagaagaagaccatgggctgggaggcctccaccgagcgcctgtacccccgcgacggcgtgctgaagggcgagacccacaaggccctgaagctgaaggacggcggccactacctggtggagttcaagtccatctacatggccaagaagcccgtgcagctgcccggctactactacgtggacgccaagctggacatcacctcccacaacgaggactacaccatcgtggagcagtacgagcgcaccgagggccgccaccacctgttcctgtagcggcccatggatattcgaacgcgtaggtaccacatggttaacctagacttgtccatcttctggattggccaacttaattaatgtatgaaataaaaggatgcacacatagtgacatgctaatcactataatgtgggcatcaaagttgtgtgttatgtgtaattactagttatctgaataaaagagaaagagatcatccatatttcttatcctaaatgaatgtcacgtgtctttataattctttgatgaaccagatgcatttcattaaccaaatccatatacatataaatattaatcatatataattaatatcaattgggttagcaaaacaaatctagtctaggtgtgttttgcgaatgcggccgccaccgcggtggagctcgaattccggtccgggcctagaaggccagcttcggccgccccgggcaactttattatacaaagttgatagatatcggaccgattaaactttaattcggtccgaagcttgcatgcctgcagtgcagcgtgacccggtcgtgcccctctctagagataatgagcattgcatgtctaagttataaaaaattaccacatattttttttgtcacacttgtttgaagtgcagtttatctatctttatacatatatttaaactttactctacgaataatataatctatagtactacaataatatcagtgttttagagaatcatataaatgaacagttagacatggtctaaaggacaattgagtattttgacaacaggactctacagttttatctttttagtgtgcatgtgttctcctttttttttgcaaatagcttcacctatataatacttcatccattttattagtacatccatttagggtttagggttaatggtttttatagactaatttttttagtacatctattttattctattttagcctctaaattaagaaaactaaaactctattttagtttttttatttaataatttagatataaaatagaataaaataaagtgactaaaaattaaacaaataccctttaagaaattaaaaaaactaaggaaacatttttcttgtttcgagtagataatgccagcctgttaaacgccgtcgacgagtctaacggacaccaaccagcgaaccagcagcgtcgcgtcgggccaagcgaagcagacggcacggcatctctgtcgctgcctctggacccctctcgagagttccgctccaccgttggacttgctccgctgtcggcatccagaaattgcgtggcggagcggcagacgtgagccggcacggcaggcggcctcctcctcctctcacggcaccggcagctacgggggattcctttcccaccgctccttcgctttcccttcctcgcccgccgtaataaatagacaccccctccacaccctctttccccaacctcgtgttgttcggagcgcacacacacacaaccagatctcccccaaatccacccgtcggcacctccgcttcaaggtacgccgctcgtcctcccccccccccctctctaccttctctagatcggcgttccggtccatgcatggttagggcccggtagttctacttctgttcatgtttgtgttagatccgtgtttgtgttagatccgtgctgctagcgttcgtacacggatgcgacctgtacgtcagacacgttctgattgctaacttgccagtgtttctctttggggaatcctgggatggctctagccgttccgcagacgggatcgatttcatgattttttttgtttcgttgcatagggtttggtttgcccttttcctttatttcaatatatgccgtgcacttgtttgtcgggtcatcttttcatgcttttttttgtcttggttgtgatgatgtggtctggttgggcggtcgttctagatcggagtagaattctgtttcaaactacctggtggatttattaattttggatctgtatgtgtgtgccatacatattcatagttacgaattgaagatgatggatggaaatatcgatctaggataggtatacatgttgatgcgggttttactgatgcatatacagagatgctttttgttcgcttggttgtgatgatgtggtgtggttgggcggtcgttcattcgttctagatcggagtagaatactgtttcaaactacctggtgtatttattaattttggaactgtatgtgtgtgtcatacatcttcatagttacgagtttaagatggatggaaatatcgatctaggataggtatacatgttgatgtgggttttactgatgcatatacatgatggcatatgcagcatctattcatatgctctaaccttgagtacctatctattataataaacaagtatgttttataattattttgatcttgatatacttggatgatggcatatgcagcagctatatgtggatttttttagccctgccttcatacgctatttatttgcttggtactgtttcttttgtcgatgctcaccctgttgtttggtgttacttctgcaggtcgactttaacttagcctaggatccacacgacaccatgtcccccgagcgccgccccgtcgagatccgcccggccaccgccgccgacatggccgccgtgtgcgacatcgtgaaccactacatcgagacctccaccgtgaacttccgcaccgagccgcagaccccgcaggagtggatcgacgacctggagcgcctccaggaccgctacccgtggctcgtggccgaggtggagggcgtggtggccggcatcgcctacgccggcccgtggaaggcccgcaacgcctacgactggaccgtggagtccaccgtgtacgtgtcccaccgccaccagcgcctcggcctcggctccaccctctacacccacctcctcaagagcatggaggcccagggcttcaagtccgtggtggccgtgatcggcctcccgaacgacccgtccgtgcgcctccacgaggccctcggctacaccgcccgcggcaccctccgcgccgccggctacaagcacggcggctggcacgacgtcggcttctggcagcgcgacttcgagctgccggccccgccgcgcccggtgcgcccggtgacgcagatctgagtcgaaacctagacttgtccatcttctggattggccaacttaattaatgtatgaaataaaaggatgcacacatagtgacatgctaatcactataatgtgggcatcaaagttgtgtgttatgtgtaattactagttatctgaataaaagagaaagagatcatccatatttcttatcctaaatgaatgtcacgtgtctttataattctttgatgaaccagatgcatttcattaaccaaatccatatacatataaatattaatcatatataattaatatcaattgggttagcaaaacaaatctagtctaggtgtgttttgcgaatgcggccgccaccgcggtggagctcgaattcattccgattaatcgtggcctcttgctcttcaggatgaagagctatgtttaaacgtgcaagcgctactagacaattcagtacattaaaaacgtccgcaatgtgttattaagttgtctaagcgtcaatttgtttacaccacaatatatcctgccaccagccagccaacagctccccgaccggcagctcggcacaaaatcaccactcgatacaggcagcccatcagtccgggacggcgtcagcgggagagccgttgtaaggcggcagactttgctcatgttaccgatgctattcggaagaacggcaactaagctgccgggtttgaaacacggatgatctcgcggagggtagcatgttgattgtaacgatgacagagcgttgctgcctgtgatcaaatatcatctccctcgcagagatccgaattatcagccttcttattcatttctcgcttaaccgtgacaggctgtcgatcttgagaactatgccgacataataggaaatcgctggataaagccgctgaggaagctgagtggcgctatttctttagaagtgaacgttgacgatcgtcgaccgtaccccgatgaattaattcggacgtacgttctgaacacagctggatacttacttgggcgattgtcatacatgacatcaacaatgtacccgtttgtgtaaccgtctcttggaggttcgtatgacactagtggttcccctcagcttgcgactagatgttgaggcctaacattttattagagagcaggctagttgcttagatacatgatcttcaggccgttatctgtcagggcaagcgaaaattggccatttatgacgaccaatgccccgcagaagctcccatctttgccgccatagacgccgcgccccccttttggggtgtagaacatccttttgccagatgtggaaaagaagttcgttgtcccattgttggcaatgacgtagtagccggcgaaagtgcgagacccatttgcgctatatataagcctacgatttccgttgcgactattgtcgtaattggatgaactattatcgtagttgctctcagagttgtcgtaatttgatggactattgtcgtaattgcttatggagttgtcgtagttgcttggagaaatgtcgtagttggatggggagtagtcatagggaagacgagcttcatccactaaaacaattggcaggtcagcaagtgcctgccccgatgccatcgcaagtacgaggcttagaaccaccttcaacagatcgcgcatagtcttccccagctctctaacgcttgagttaagccgcgccgcgaagcggcgtcggcttgaacgaattgttagacattatttgccgactaccttggtgatctcgcctttcacgtagtgaacaaattcttccaactgatctgcgcgcgaggccaagcgatcttcttgtccaagataagcctgcctagcttcaagtatgacgggctgatactgggccggcaggcgctccattgcccagtcggcagcgacatccttcggcgcgattttgccggttactgcgctgtaccaaatgcgggacaacgtaagcactacatttcgctcatcgccagcccagtcgggcggcgagttccatagcgttaaggtttcatttagcgcctcaaatagatcctgttcaggaaccggatcaaagagttcctccgccgctggacctaccaaggcaacgctatgttctcttgcttttgtcagcaagatagccagatcaatgtcgatcgtggctggctcgaagatacctgcaagaatgtcattgcgctgccattctccaaattgcagttcgcgcttagctggataacgccacggaatgatgtcgtcgtgcacaacaatggtgacttctacagcgcggagaatctcgctctctccaggggaagccgaagtttccaaaaggtcgttgatcaaagctcgccgcgttgtttcatcaagccttacagtcaccgtaaccagcaaatcaatatcactgtgtggcttcaggccgccatccactgcggagccgtacaaatgtacggccagcaacgtcggttcgagatggcgctcgatgacgccaactacctctgatagttgagtcgatacttcggcgatcaccgcttccctcatgatgtttaactcctgaattaagccgcgccgcgaagcggtgtcggcttgaatgaattgttaggcgtcatcctgtgctcccgagaaccagtaccagtacatcgctgtttcgttcgagacttgaggtctagttttatacgtgaacaggtcaatgccgccgagagtaaagccacattttgcgtacaaattgcaggcaggtacattgttcgtttgtgtctctaatcgtatgccaaggagctgtctgcttagtgcccactttttcgcaaattcgatgagactgtgcgcgactcctttgcctcggtgcgtgtgcgacacaacaatgtgttcgatagaggctagatcgttccatgttgagttgagttcaatcttcccgacaagctcttggtcgatgaatgcgccatagcaagcagagtcttcatcagagtcatcatccgagatgtaatccttccggtaggggctcacacttctggtagatagttcaaagccttggtcggataggtgcacatcgaacacttcacgaacaatgaaatggttctcagcatccaatgtttccgccacctgctcagggatcaccgaaatcttcatatgacgcctaacgcctggcacagcggatcgcaaacctggcgcggcttttggcacaaaaggcgtgacaggtttgcgaatccgttgctgccacttgttaacccttttgccagatttggtaactataatttatgttagaggcgaagtcttgggtaaaaactggcctaaaattgctggggatttcaggaaagtaaacatcaccttccggctcgatgtctattgtagatatatgtagtgtatctacttgatcgggggatctgctgcctcgcgcgtttcggtgatgacggtgaaaacctctgacacatgcagctcccggagacggtcacagcttgtctgtaagcggatgccgggagcagacaagcccgtcagggcgcgtcagcgggtgttggcgggtgtcggggcgcagccatgacccagtcacgtagcgatagcggagtgtatactggcttaactatgcggcatcagagcagattgtactgagagtgcaccatatgcggtgtgaaataccgcacagatgcgtaaggagaaaataccgcatcaggcgctcttccgcttcctcgctcactgactcgctgcgctcggtcgttcggctgcggcgagcggtatcagctcactcaaaggcggtaatacggttatccacagaatcaggggataacgcaggaaagaacatgtgagcaaaaggccagcaaaaggccaggaaccgtaaaaaggccgcgttgctggcgtttttccataggctccgcccccctgacgagcatcacaaaaatcgacgctcaagtcagaggtggcgaaacccgacaggactataaagataccaggcgtttccccctggaagctccctcgtgcgctctcctgttccgaccctgccgcttaccggatacctgtccgcctttctcccttcgggaagcgtggcgctttctcatagctcacgctgtaggtatctcagttcggtgtaggtcgttcgctccaagctgggctgtgtgcacgaaccccccgttcagcccgaccgctgcgccttatccggtaactatcgtcttgagtccaacccggtaagacacgacttatcgccactggcagcagccactggtaacaggattagcagagcgaggtatgtaggcggtgctacagagttcttgaagtggtggcctaactacggctacactagaaggacagtatttggtatctgcgctctgctgaagccagttaccttcggaaaaagagttggtagctcttgatccggcaaacaaaccaccgctggtagcggtggtttttttgtttgcaagcagcagattacgcgcagaaaaaaaggatctcaagaagatcctttgatcttttctacggggtctgacgctcagtggaacgaaaactcacgttaagggattttggtcatgagattatcaaaaaggatcttcacctagatccttttaaattaaaaatgaagttttaaatcaatctaaagtatatatgagtaaacttggtctgacagttaccaatgcttaatcagtgaggcacctatctcagcgatctgtctatttcgttcatccatagttgcctgactccccgtcgtgtagataactacgatacgggagggcttaccatctggccccagtgctgcaatgataccgcgagacccacgctcaccggctccagatttatcagcaataaaccagccagccggaagggccgagcgcagaagtggtcctgcaactttatccgcctccatccagtctattaattgttgccgggaagctagagtaagtagttcgccagttaatagtttgcgcaacgttgttgccattgctgcagggggggggggggggggggacttccattgttcattccacggacaaaaacagagaaaggaaacgacagaggccaaaaagcctcgctttcagcacctgtcgtttcctttcttttcagagggtattttaaataaaaacattaagttatgacgaagaagaacggaaacgccttaaaccggaaaattttcataaatagcgaaaacccgcgaggtcgccgccccgtaacctgtcggatcaccggaaaggacccgtaaagtgataatgattatcatctacatatcacaacgtgcgtggaggccatcaaaccacgtcaaataatcaattatgacgcaggtatcgtattaattgatctgcatcaacttaacgtaaaaacaacttcagacaatacaaatcagcgacactgaatacggggcaacctcatgtcccccccccccccccccctgcaggcatcgtggtgtcacgctcgtcgtttggtatggcttcattcagctccggttcccaacgatcaaggcgagttacatgatcccccatgttgtgcaaaaaagcggttagctccttcggtcctccgatcgttgtcagaagtaagttggccgcagtgttatcactcatggttatggcagcactgcataattctcttactgtcatgccatccgtaagatgcttttctgtgactggtgagtactcaaccaagtcattctgagaatagtgtatgcggcgaccgagttgctcttgcccggcgtcaacacgggataataccgcgccacatagcagaactttaaaagtgctcatcattggaaaacgttcttcggggcgaaaactctcaaggatcttaccgctgttgagatccagttcgatgtaacccactcgtgcacccaactgatcttcagcatcttttactttcaccagcgtttctgggtgagcaaaaacaggaaggcaaaatgccgcaaaaaagggaataagggcgacacggaaatgttgaatactcatactcttcctttttcaatattattgaagcatttatcagggttattgtctcatgagcggatacatatttgaatgtatttagaaaaataaacaaataggggttccgcgcacatttccccgaaaagtgccacctgacgtctaagaaaccattattatcatgacattaacctataaaaataggcgtatcacgaggccctttcgtcttcaagaattcggagcttttgccattctcaccggattcagtcgtcactcatggtgatttctcacttgataaccttatttttgacgaggggaaattaataggttgtattgatgttggacgagtcggaatcgcagaccgataccaggatcttgccatcctatggaactgcctcggtgagttttctccttcattacagaaacggctttttcaaaaatatggtattgataatcctgatatgaataaattgcagtttcatttgatgctcgatgagtttttctaatcagaattggttaattggttgtaacactggcagagcattacgctgacttgacgggacggcggctttgttgaataaatcgaacttttgctgagttgaaggatcagatcacgcatcttcccgacaacgcagaccgttccgtggcaaagcaaaagttcaaaatcaccaactggtccacctacaacaaagctctcatcaaccgtggctccctcactttctggctggatgatggggcgattcaggcctggtatgagtcagcaacaccttcttcacgaggcagacctcagcgccagaaggccgccagagaggccgagcgcggccgtgaggcttggacgctagggcagggcatgaaaaagcccgtagcgggctgctacgggcgtctgacgcggtggaaagggggaggggatgttgtctacatggctctgctgtagtgagtgggttgcgctccggcagcggtcctgatcaatcgtcaccctttctcggtccttcaacgttcctgacaacgagcctccttttcgccaatccatcgacaatcaccgcgagtccctgctcgaacgctgcgtccggaccggcttcgtcgaaggcgtctatcgcggcccgcaacagcggcgagagcggagcctgttcaacggtgccgccgcgctcgccggcatcgctgtcgccggcctgctcctcaagcacggccccaacagtgaagtagctgattgtcatcagcgcattgacggcgtccccggccgaaaaacccgcctcgcagaggaagcgaagctgcgcgtcggccgtttccatctgcggtgcgcccggtcgcgtgccggcatggatgcgcgcgccatcgcggtaggcgagcagcgcctgcctgaagctgcgggcattcccgatcagaaatgagcgccagtcgtcgtcggctctcggcaccgaatgcgtatgattctccgccagcatggcttcggccagtgcgtcgagcagcgcccgcttgttcctgaagtgccagtaaagcgccggctgctgaacccccaaccgttccgccagtttgcgtgtcgtcagaccgtctacgccgacctcgttcaacaggtccagggcggcacggatcactgtattcggctgcaactttgtcatgcttgacactttatcactgataaacataatatgtccaccaacttatcagtgataaagaatccgcgcgttcaatcggaccagcggaggctggtccggaggccagacgtgaaacccaacatacccctgatcgtaattctgagcactgtcgcgctcgacgctgtcggcatcggcctgattatgccggtgctgccgggcctcctgcgcgatctggttcactcgaacgacgtcaccgcccactatggcattctgctggcgctgtatgcgttggtgcaatttgcctgcgcacctgtgctgggcgcgctgtcggatcgtttcgggcggcggccaatcttgctcgtctcgctggccggcgccactgtcgactacgccatcatggcgacagcgcctttcctttgggttctctatatcgggcggatcgtggccggcatcaccggggcgactggggcggtagccggcgcttatattgccgatatcactgatggcgatgagcgcgcgcggcacttcggcttcatgagcgcctgtttcgggttcgggatggtcgcgggacctgtgctcggtgggctgatgggcggtttctccccccacgctccgttcttcgccgcggcagccttgaacggcctcaatttcctgacgggctgtttccttttgccggagtcgcacaaaggcgaacgccggccgttacgccgggaggctctcaacccgctcgcttcgttccggtgggcccggggcatgaccgtcgtcgccgccctgatggcggtcttcttcatcatgcaacttgtcggacaggtgccggccgcgctttgggtcattttcggcgaggatcgctttcactgggacgcgaccacgatcggcatttcgcttgccgcatttggcattctgcattcactcgcccaggcaatgatcaccggccctgtagccgcccggctcggcgaaaggcgggcactcatgctcggaatgattgccgacggcacaggctacatcctgcttgccttcgcgacacggggatggatggcgttcccgatcatggtcctgcttgcttcgggtggcatcggaatgccggcgctgcaagcaatgttgtccaggcaggtggatgaggaacgtcaggggcagctgcaaggctcactggcggcgctcaccagcctgacctcgatcgtcggacccctcctcttcacggcgatctatgcggcttctataacaacgtggaacgggtgggcatggattgcaggcgctgccctctacttgctctgcctgccggcgctgcgtcgcgggctttggagcggcgcagggcaacgagccgatcgctgatcgtggaaacgataggcctatgccatgcgggtcaaggcgacttccggcaagctatacgcgccctaggagtgcggttggaacgttggcccagccagatactcccgatcacgagcaggacgccgatgatttgaagcgcactcagcgtctgatccaagaacaaccatcctagcaacacggcggtccccgggctgagaaagcccagtaaggaaacaactgtaggttcgagtcgcgagatcccccggaaccaaaggaagtaggttaaacccgctccgatcaggccgagccacgccaggccgagaacattggttcctgtaggcatcgggattggcggatcaaacactaaagctactggaacgagcagaagtcctccggccgccagttgccaggcggtaaaggtgagcagaggcacgggaggttgccacttgcgggtcagcacggttccgaacgccatggaaaccgcccccgccaggcccgctgcgacgccgacaggatctagcgctgcgtttggtgtcaacaccaacagcgccacgcccgcagttccgcaaatagcccccaggaccgccatcaatcgtatcgggctacctagcagagcggcagagatgaacacgaccatcagcggctgcacagcgcctaccgtcgccgcgaccccgcccggcaggcggtagaccgaaataaacaacaagctccagaatagcgaaatattaagtgcgccgaggatgaagatgcgcatccaccagattcccgttggaatctgtcggacgatcatcacgagcaataaacccgccggcaacgcccgcagcagcataccggcgacccctcggcctcgctgttcgggctccacgaaaacgccggacagatgcgccttgtgagcgtccttggggccgtcctcctgtttgaagaccgacagcccaatgatctcgccgtcgatgtaggcgccgaatgccacggcatctcgcaaccgttcagcgaacgcctccatgggctttttctcctcgtgctcgtaaacggacccgaacatctctggagctttcttcagggccgacaatcggatctcgcggaaatcctgcacgtcggccgctccaagccgtcgaatctgagccttaatcacaattgtcaattttaatcctctgtttatcggcagttcgtagagcgcgccgtgcgtcccgagcgatactgagcgaagcaagtgcgtcgagcagtgcccgcttgttcctgaaatgccagtaaagcgctggctgctgaacccccagccggaactgaccccacaaggccctagcgtttgcaatgcaccaggtcatcattgacccaggcgtgttccaccaggccgctgcctcgcaactcttcgcaggcttcgccgacctgctcgcgccacttcttcacgcgggtggaatccgatccgcacatgaggcggaaggtttccagcttgagcgggtacggctcccggtgcgagctgaaatagtcgaacatccgtcgggccgtcggcgacagcttgcggtacttctcccatatgaatttcgtgtagtggtcgccagcaaacagcacgacgatttcctcgtcgatcaggacctggcaacgggacgttttcttgccacggtccaggacgcggaagcggtgcagcagcgacaccgattccaggtgcccaacgcggtcggacgtgaagcccatcgccgtcgcctgtaggcgcgacaggcattcctcggccttcgtgtaataccggccattgatcgaccagcccaggtcctggcaaagctcgtagaacgtgaaggtgatcggctcgccgataggggtgcgcttcgcgtactccaacacctgctgccacaccagttcgtcatcgtcggcccgcagctcgacgccggtgtaggtgatcttcacgtccttgttgacgtggaaaatgaccttgttttgcagcgcctcgcgcgggattttcttgttgcgcgtggtgaacagggcagagcgggccgtgtcgtttggcatcgctcgcatcgtgtccggccacggcgcaatatcgaacaaggaaagctgcatttccttgatctgctgcttcgtgtgtttcagcaacgcggcctgcttggcctcgctgacctgttttgccaggtcctcgccggcggtttttcgcttcttggtcgtcatagttcctcgcgtgtcgatggtcatcgacttcgccaaacctgccgcctcctgttcgagacgacgcgaacgctccacggcggccgatggcgcgggcagggcagggggagccagttgcacgctgtcgcgctcgatcttggccgtagcttgctggaccatcgagccgacggactggaaggtttcgcggggcgcacgcatgacggtgcggcttgcgatggtttcggcatcctcggcggaaaaccccgcgtcgatcagttcttgcctgtatgccttccggtcaaacgtccgattcattcaccctccttgcgggattgccccgactcacgccggggcaatgtgcccttattcctgatttgacccgcctggtgccttggtgtccagataatccaccttatcggcaatgaagtcggtcccgtagaccgtctggccgtccttctcgtacttggtattccgaatcttgccctgcacgaataccagcgaccccttgcccaaatacttgccgtgggcctcggcctgagagccaaaacacttgatgcggaagaagtcggtgcgctcctgcttgtcgccggcatcgttgcgccactcttcattaaccgctatatcgaaaattgcttgcggcttgttagaattgccatgacgtacctcggtgtcacgggtaagattaccgataaactggaactgattatggctcatatcgaaagtctccttgagaaaggagactctagtttagctaaacattggttccgctgtcaagaactttagcggctaaaattttgcgggccgcgaccaaaggtgcgaggggcggcttccgctgtgtacaaccagatatttttcaccaacatccttcgtctgctcgatgagcggggcatgacgaaacatgagctgtcggagagggcaggggtttcaatttcgtttttatcagacttaaccaacggtaaggccaacccctcgttgaaggtgatggaggccattgccgacgccctggaaactcccctacctcttctcctggagtccaccgaccttgaccgcgaggcactcgcggagattgcgggtcatcctttcaagagcagcgtgccgcccggatacgaacgcatcagtgtggttttgccgtcacataaggcgtttatcgtaaagaaatggggcgacgacacccgaaaaaagctgcgtggaaggctctgacgccaagggttagggcttgcacttccttctttagccgctaaaacggccccttctctgcgggccgtcggctcgcgcatcatatcgacatcctcaacggaagccgtgccgcgaatggcatcgggcgggtgcgctttgacagttgttttctatcagaacccctacgtcgtgcggttcgattagctgtttgtcttgcaggctaaacactttcggtatatcgtttgcctgtgcgataatgttgctaatgatttgttgcgtaggggttactgaaaagtgagcgggaaagaagagtttcagaccatcaaggagcgggccaagcgcaagctggaacgcgacatgggtgcggacctgttggccgcgctcaacgacccgaaaaccgttgaagtcatgctcaacgcggacggcaaggtgtggcacgaacgccttggcgagccgatgcggtacatctgcgacatgcggcccagccagtcgcaggcgattatagaaacggtggccggattccacggcaaagaggtcacgcggcattcgcccatcctggaaggcgagttccccttggatggcagccgctttgccggccaattgccgccggtcgtggccgcgccaacctttgcgatccgcaagcgcgcggtcgccatcttcacgctggaacagtacgtcgaggcgggcatcatgacccgcgagcaatacgaggtcattaaaagcgccgtcgcggcgcatcgaaacatcctcgtcattggcggtactggctcgggcaagaccacgctcgtcaacgcgatcatcaatgaaatggtcgccttcaacccgtctgagcgcgtcgtcatcatcgaggacaccggcgaaatccagtgcgccgcagagaacgccgtccaataccacaccagcatcgacgtctcgatgacgctgctgctcaagacaacgctgcgtatgcgccccgaccgcatcctggtcggtgaggtacgtggccccgaagcccttgatctgttgatggcctggaacaccgggcatgaaggaggtgccgccaccctgcacgcaaacaaccccaaagcgggcctgagccggctcgccatgcttatcagcatgcacccggattcaccgaaacccattgagccgctgattggcgaggcggttcatgtggtcgtccatatcgccaggacccctagcggccgtcgagtgcaagaaattctcgaagttcttggttacgagaacggccagtacatcaccaaaaccctgtaaggagtatttccaatgacaacggctgttccgttccgtctgaccatgaatcgcggcattttgttctaccttgccgtgttcttcgttctcgctctcgcgttatccgcgcatccggcgatggcctcggaaggcaccggcggcagcttgccatatgagagctggctgacgaacctgcgcaactccgtaaccggcccggtggccttcgcgctgtccatcatcggcatcgtcgtcgccggcggcgtgctgatcttcggcggcgaactcaacgccttcttccgaaccctgatcttcctggttctggtgatggcgctgctggtcggcgcgcagaacgtgatgagcaccttcttcggtcgtggtgccgaaatcgcggccctcggcaacggggcgctgcaccaggtgcaagtcgcggcggcggatgccgtgcgtgcggtagcggctggacggctcgcctaatcatggctctgcgcacgatccccatccgtcgcgcaggcaaccgagaaaacctgttcatgggtggtgatcgtgaactggtgatgttctcgggcctgatggcgtttgcgctgattttcagcgcccaagagctgcgggccaccgtggtcggtctgatcctgtggttcggggcgctctatgcgttccgaatcatggcgaaggccgatccgaagatgcggttcgtgtacctgcgtcaccgccggtacaagccgtattacccggcccgctcgaccccgttccgcgagaacaccaatagccaagggaagcaataccgatgatccaagcaattgcgattgcaatcgcgggcctcggcgcgcttctgttgttcatcctctttgcccgcatccgcgcggtcgatgccgaactgaaactgaaaaagcatcgttccaaggacgccggcctggccgatctgctcaactacgccgctgtcgtcgatgacggcgtaatcgtgggcaagaacggcagctttatggctgcctggctgtacaagggcgatgacaacgcaagcagcaccgaccagcagcgcgaagtagtgtccgcccgcatcaaccaggccctcgcgggcctgggaagtgggtggatgatccatgtggacgccgtgcggcgtcctgctccgaactacgcggagcggggcctgtcggcgttccctgaccgtctgacggcagcgattgaagaagagcgctcggtcttgccttgctcgtcggtgatgtacttcaccagctccgcgaagtcgctcttcttgatggagcgcatggggacgtgcttggcaatcacgcgcaccccccggccgttttagcggctaaaaaagtcatggctctgccctcgggcggaccacgcccatcatgaccttgccaagctcgtcctgcttctcttcgatcttcgccagcagggcgaggatcgtggcatcaccgaaccgcgccgtgcgcgggtcgtcggtgagccagagtttcagcaggccgcccaggcggcccaggtcgccattgatgcgggccagctcgcggacgtgctcatagtccacgacgcccgtgattttgtagccctggccgacggccagcaggtaggccgacaggctcatgccggccgccgccgccttttcctcaatcgctcttcgttcgtctggaaggcagtacaccttgataggtgggctgcccttcctggttggcttggtttcatcagccatccgcttgccctcatctgttacgccggcggtagccggccagcctcgcagagcaggattcccgttgagcaccgccaggtgcgaataagggacagtgaagaaggaacacccgctcgcgggtgggcctacttcacctatcctgcccggctgacgccgttggatacaccaaggaaagtctacacgaaccctttggcaaaatcctgtatatcgtgcgaaaaaggatggatataccgaaaaaatcgctataatgaccccgaagcagggttatgcagcggaaaagcgctgcttccctgctgttttgtggaatatctaccgactggaaacaggcaaatgcaggaaattactgaactgaggggacaggcgagagacgatgccaaagagctacaccgacgagctggccgagtgggttgaatcccgcgcggccaagaagcgccggcgtgatgaggctgcggttgcgttcctggcggtgagggcggatgtcgaggcggcgttagcgtccggctatgcgctcgtcaccatttgggagcacatgcgggaaacggggaaggtcaagttctcctacgagacgttccgctcgcacgccaggcggcacatcaaggccaagcccgccgatgtgcccgcaccgcaggccaaggctgcggaacccgcgccggcacccaagacgccggagccacggcggccgaagcaggggggcaaggctgaaaagccggcccccgctgcggccccgaccggcttcaccttcaacccaacaccggacaaaaaggatctactgtaatggcgaaaattcacatggttttgcagggcaagggcggggtcggcaagtcggccatcgccgcgatcattgcgcagtacaagatggacaaggggcagacacccttgtgcatcgacaccgacccggtgaacgcgacgttcgagggctacaaggccctgaacgtccgccggctgaacatcatggccggcgacgaaattaactcgcgcaacttcgacaccctggtcgagctgattgcgccgaccaaggatgacgtggtgatcgacaacggtgccagctcgttcgtgcctctgtcgcattacctcatcagcaaccaggtgccggctctgctgcaagaaatggggcatgagctggtcatccataccgtcgtcaccggcggccaggctctcctggacacggtgagcggcttcgcccagctcgccagccagttcccggccgaagcgcttttcgtggtctggctgaacccgtattgggggcctatcgagcatgagggcaagagctttgagcagatgaaggcgtacacggccaacaaggcccgcgtgtcgtccatcatccagattccggccctcaaggaagaaacctacggccgcgatttcagcgacatgctgcaagagcggctgacgttcgaccaggcgctggccgatgaatcgctcacgatcatgacgcggcaacgcctcaagatcgtgcggcgcggcctgtttgaacagctcgacgcggcggccgtgctatgagcgaccagattgaagagctgatccgggagattgcggccaagcacggcatcgccgtcggccgcgacgacccggtgctgatcctgcataccatcaacgcccggctcatggccgacagtgcggccaagcaagaggaaatccttgccgcgttcaaggaagagctggaagggatcgcccatcgttggggcgaggacgccaaggccaaagcggagcggatgctgaacgcggccctggcggccagcaaggacgcaatggcgaaggtaatgaaggacagcgccgcgcaggcggccgaagcgatccgcagggaaatcgacgacggccttggccgccagctcgcggccaaggtcgcggacgcgcggcgcgtggcgatgatgaacatgatcgccggcggcatggtgttgttcgcggccgccctggtggtgtgggcctcgttatgaatcgcagaggcgcagatgaaaaagcccggcgttgccgggctttgtttttgcgttagctgggcttgtttgacaggcccaagctctgactgcgcccgcgctcgcgctcctgggcctgtttcttctcctgctcctgcttgcgcatcagggcctggtgccgtcgggctgcttcacgcatcgaatcccagtcgccggccagctcgggatgctccgcgcgcatcttgcgcgtcgccagttcctcgatcttgggcgcgtgaatgcccatgccttccttgatttcgcgcaccatgtccagccgcgtgtgcagggtctgcaagcgggcttgctgttgggcctgctgctgctgccaggcggcctttgtacgcggcagggacagcaagccgggggcattggactgtagctgctgcaaacgcgcctgctgacggtctacgagctgttctaggcggtcctcgatgcgctccacctggtcatgctttgcctgcacgtagagcgcaagggtctgctggtaggtctgctcgatgggcgcggattctaagagggcctgctgttccgtctcggcctcctgggccgcctgtagcaaatcctcgccgctgttgccgctggactgctttactgccggggactgctgttgccctgctcgcgccgtcgtcgcagttcggcttgcccccactcgattgactgcttcatttcgagccgcagcgatgcgatctcggattgcgtcaacggacggggcagcgcggaggtgtccggcttctccttgggtgagtcggtcgatgccatagccaaaggtttccttccaaaatgcgtccattgctggaccgtgtttctcattgatgcccgcaagcatcttcggcttgaccgccaggtcaagcgcgccttcatgggcggtcatgacggacgccgccatgaccttgccgccgttgttctcgatgtagccgcgtaatgaggcaatggtgccgcccatcgtcagcgtgtcatcgacaacgatgtacttctggccggggatcacctccccctcgaaagtcgggttgaacgccaggcgatgatctgaaccggctccggttcgggcgaccttctcccgctgcacaatgtccgtttcgacctcaaggccaaggcggtcggccagaacgaccgccatcatggccggaatcttgttgttccccgccgcctcgacggcgaggactggaacgatgcggggcttgtcgtcgccgatcagcgtcttgagctgggcaacagtgtcgtccgaaatcaggcgctcgaccaaattaagcgccgcttccgcgtcgccctgcttcgcagcctggtattcaggctcgttggtcaaagaaccaaggtcgccgttgcgaaccaccttcgggaagtctccccacggtgcgcgctcggctctgctgtagctgctcaagacgcctccctttttagccgctaaaactctaacgagtgcgcccgcgactcaacttgacgctttcggcacttacctgtgccttgccacttgcgtcataggtgatgcttttcgcactcccgatttcaggtactttatcgaaatctgaccgggcgtgcattacaaagttcttccccacctgttggtaaatgctgccgctatctgcgtggacgatgctgccgtcgtggcgctgcgacttatcggccttttgggccatatagatgttgtaaatgccaggtttcagggccccggctttatctaccttctggttcgtccatgcgccttggttctcggtctggacaattctttgcccattcatgaccaggaggcggtgtttcattgggtgactcctgacggttgcctctggtgttaaacgtgtcctggtcgcttgccggctaaaaaaaagccgacctcggcagttcgaggccggctttccctagagccgggcgcgtcaaggttgttccatctattttagtgaactgcgttcgatttatcagttactttcctcccgctttgtgtttcctcccactcgtttccgcgtctagccgacccctcaacatagcggcctcttcttgggctgcctttgcctcttgccgcgcttcgtcacgctcggcttgcaccgtcgtaaagcgctcggcctgcctggccgcctcttgcgccgccaacttcctttgctcctggtgggcctcggcgtcggcctgcgccttcgctttcaccgctgccaactccgtgcgcaaactctccgcttcgcgcctggtggcgtcgcgctcgccgcgaagcgcctgcatttcctggttggccgcgtccagggtcttgcggctctcttctttgaatgcgcgggcgtcctggtgagcgtagtccagctcggcgcgcagctcctgcgctcgacgctccacctcgtcggcccgctgcgtcgccagcgcggcccgctgctcggctcctgccagggcggtgcgtgcttcggccagggcttgccgctggcgtgcggccagctcggccgcctcggcggcctgctgctctagcaatgtaacgcgcgcctgggcttcttccagctcgcgggcctgcgcctcgaaggcgtcggccagctccccgcgcacggcttccaactcgttgcgctcacgatcccagccggcttgcgctgcctgcaacgattcattggcaagggcctgggcggcttgccagagggcggccacggcctggttgccggcctgctgcaccgcgtccggcacctggactgccagcggggcggcctgcgccgtgcgctggcgtcgccattcgcgcatgccggcgctggcgtcgttcatgttgacgcgggcggccttacgcactgcatccacggtcgggaagttctcccggtcgccttgctcgaacagctcgtccgcagccgcaaaaatgcggtcgcgcgtctctttgttcagttccatgttggctccggtaattggtaagaataataatactcttacctaccttatcagcgcaagagtttagctgaacagttctcgacttaacggcaggttttttagcggctgaagggcaggcaaaaaaagccccgcacggtcggcgggggcaaagggtcagcgggaaggggattagcgggcgtcgggcttcttcatgcgtcggggccgcgcttcttgggatggagcacgacgaagcgcgcacgcgcatcgtcctcggccctatcggcccgcgtcgcggtcaggaacttgtcgcgcgctaggtcctccctggtgggcaccaggggcatgaactcggcctgctcgatgtaggtccactccatgaccgcatcgcagtcgaggccgcgttccttcaccgtctcttgcaggtcgcggtacgcccgctcgttgagcggctggtaacgggccaattggtcgtaaatggctgtcggccatgagcggcctttcctgttgagccagcagccgacgacgaagccggcaatgcaggcccctggcacaaccaggccgacgccgggggcaggggatggcagcagctcgccaaccaggaaccccgccgcgatgatgccgatgccggtcaaccagcccttgaaactatccggccccgaaacacccctgcgcattgcctggatgctgcgccggatagcttgcaacatcaggagccgtttcttttgttcgtcagtcatggtccgccctcaccagttgttcgtatcggtgtcggacgaactgaaatcgcaagagctgccggtatcggtccagccgctgtccgtgtcgctgctgccgaagcacggcgaggggtccgcgaacgccgcagacggcgtatccggccgcagcgcatcgcccagcatggccccggtcagcgagccgccggccaggtagcccagcatggtgctgttggtcgccccggccaccagggccgacgtgacgaaatcgccgtcattccctctggattgttcgctgctcggcggggcagtgcgccgcgccggcggcgtcgtggatggctcgggttggctggcctgcgacggccggcgaaaggtgcgcagcagctcgttatcgaccggctgcggcgtcggggccgccgccttgcgctgcggtcggtgttccttcttcggctcgcgcagcttgaacagcatgatcgcggaaaccagcagcaacgccgcgcctacgcctcccgcgatgtagaacagcatcggattcattcttcggtcctccttgtagcggaaccgttgtctgtgcggcgcgggtggcccgcgccgctgtctttggggatcagccctcgatgagcgcgaccagtttcacgtcggcaaggttcgcctcgaactcctggccgtcgtcctcgtacttcaaccaggcatagccttccgccggcggccgacggttgaggataaggcgggcagggcgctcgtcgtgctcgacctggacgatggcctttttcagcttgtccgggtccggctccttcgcgcccttttccttggcgtccttaccgtcctggtcgccgtcctcgccgtcctggccgtcgccggcctccgcgtcacgctcggcatcagtctggccgttgaaggcatcgacggtgttgggatcgcggcccttctcgtccaggaactcgcgcagcagcttgaccgtgccgcgcgtgatttcctgggtgtcgtcgtcaagccacgcctcgacttcctccgggcgcttcttgaaggccgtcaccagctcgttcaccacggtcacgtcgcgcacgcggccggtgttgaacgcatcggcgatcttctccggcaggtccagcagcgtgacgtgctgggtgatgaacgccggcgacttgccgatttccttggcgatatcgcctttcttcttgcccttcgccagctcgcggccaatgaagtcggcaatttcgcgcggggtcagctcgttgcgttgcaggttctcgataacctggtcggcttcgttgtagtcgttgtcgatgaacgccgggatggacttcttgccggcccacttcgagccacggtagcggcgggcgccgtgattgatgatatagcggcccggctgctcctggttctcgcgcaccgaaatgggtgacttcaccccgcgctctttgatcgtggcaccgatttccgcgatgctctccggggaaaagccggggttgtcggccgtccgcggctgatgcggatcttcgtcgatcaggtccaggtccagctcgatagggccggaaccgccctgagacgccgcaggagcgtccaggaggctcgacaggtcgccgatgctatccaaccccaggccggacggctgcgccgcgcctgcggcttcctgagcggccgcagcggtgtttttcttggtggtcttggcttgagccgcagtcattgggaaatctccatcttcgtgaacacgtaatcagccagggcgcgaacctctttcgatgccttgcgcgcggccgttttcttgatcttccagaccggcacaccggatgcgagggcatcggcgatgctgctgcgcaggccaacggtggccggaatcatcatcttggggtacgcggccagcagctcggcttggtggcgcgcgtggcgcggattccgcgcatcgaccttgctgggcaccatgccaaggaattgcagcttggcgttcttctggcgcacgttcgcaatggtcgtgaccatcttcttgatgccctggatgctgtacgcctcaagctcgatgggggacagcacatagtcggccgcgaagagggcggccgccaggccgacgccaagggtcggggccgtgtcgatcaggcacacgtcgaagccttggttcgccagggccttgatgttcgccccgaacagctcgcgggcgtcgtccagcgacagccgttcggcgttcgccagtaccgggttggactcgatgagggcgaggcgcgcggcctggccgtcgccggctgcgggtgcggtttcggtccagccgccggcagggacagcgccgaacagcttgcttgcatgcaggccggtagcaaagtccttgagcgtgtaggacgcattgccctgggggtccaggtcgatcacggcaacccgcaagccgcgctcgaaaaagtcgaaggcaagatgcacaagggtcgaagtcttgccgacgccgcctttctggttggccgtgaccaaagttttcatcgtttggtttcctgttttttcttggcgtccgcttcccacttccggacgatgtacgcctgatgttccggcagaaccgccgttacccgcgcgtacccctcgggcaagttcttgtcctcgaacgcggcccacacgcgatgcaccgcttgcgacactgcgcccctggtcagtcccagcgacgttgcgaacgtcgcctgtggcttcccatcgactaagacgccccgcgctatctcgatggtctgctgccccacttccagcccctggatcgcctcctggaactggctttcggtaagccgtttcttcatggataacacccataatttgctccgcgccttggttgaacatagcggtgacagccgccagcacatgagagaagtttagctaaacatttctcgcacgtcaacacctttagccgctaaaactcgtccttggcgtaacaaaacaaaagcccggaaaccgggctttcgtctcttgccgcttatggctctgcacccggctccatcaccaacaggtcgcgcacgcgcttcactcggttgcggatcgacactgccagcccaacaaagccggttgccgccgccgccaggatcgcgccgatgatgccggccacaccggccatcgcccaccaggtcgccgccttccggttccattcctgctggtactgcttcgcaatgctggacctcggctcaccataggctgaccgctcgatggcgtatgccgcttctccccttggcgtaaaacccagcgccgcaggcggcattgccatgctgcccgccgctttcccgaccacgacgcgcgcaccaggcttgcggtccagaccttcggccacggcgagctgcgcaaggacataatcagccgccgacttggctccacgcgcctcgatcagctcttgcactcgcgcgaaatccttggcctccacggccgccatgaatcgcgcacgcggcgaaggctccgcagggccggcgtcgtgatcgccgccgagaatgcccttcaccaagttcgacgacacgaaaatcatgctgacggctatcaccatcatgcagacggatcgcacgaacccgctgaattgaacacgagcacggcacccgcgaccactatgccaagaatgcccaaggtaaaaattgccggccccgccatgaagtccgtgaatgccccgacggccgaagtgaagggcaggccgccacccaggccgccgccctcactgcccggcacctggtcgctgaatgtcgatgccagcacctgcggcacgtcaatgcttccgggcgtcgcgctcgggctgatcgcccatcccgttactgccccgatcccggcaatggcaaggactgccagcgctgccatttttggggtgaggccgttcgcggccgaggggcgcagcccctggggggatgggaggcccgcgttagcgggccgggagggttcgagaagggggggcaccccccttcggcgtgcgcggtcacgcgcacagggcgcagccctggttaaaaacaaggtttataaatattggtttaaaagcaggttaaaagacaggttagcggtggccgaaaaacgggcggaaacccttgcaaatgctggattttctgcctgtggacagcccctcaaatgtcaataggtgcgcccctcatctgtcagcactctgcccctcaagtgtcaaggatcgcgcccctcatctgtcagtagtcgcgcccctcaagtgtcaataccgcagggcacttatccccaggcttgtccacatcatctgtgggaaactcgcgtaaaatcaggcgttttcgccgatttgcgaggctggccagctccacgtcgccggccgaaatcgagcctgcccctcatctgtcaacgccgcgccgggtgagtcggcccctcaagtgtcaacgtccgcccctcatctgtcagtgagggccaagttttccgcgaggtatccacaacgccggcggccgcggtgtctcgcacacggcttcgacggcgtttctggcgcgtttgcagggccatagacggccgccagcccagcggcgagggcaaccagcccggtgagcgtcggaaaggcgctggaagccccgtagcgacgcggagaggggcgagacaagccaagggcgcaggctcgatgcgcagcacgacatagccggttctcgcaaggacgagaatttccctgcggtgcccctcaagtgtcaatgaaagtttccaacgcgagccattcgcgagagccttgagtccacgctagatgagagctttgttgtaggtggaccagttggtgattttgaacttttgctttgccacggaacggtctgcgttgtcgggaagatgcgtgatctgatccttcaactcagcaaaagttcgatttattcaacaaagccacgttgtgtctcaaaatctctgatgttacattgcacaagataaaaatatatcatcatgaacaataaaactgtctgcttacataaacagtaatacaaggggtgttatgagccatattcaacgggaaacgtcttgctcgactctagagctcgttcctcgaggcctcgaggcctcgaggaacggtacctgcggggaagcttacaataatgtgtgttgttaagtcttgttgcctgtcatcgtctgactgactttcgtcataaatcccggcctccgtaacccagctttgggcaagctcacggatttgatccggcggaacgggaatatcgagatgccgggctgaacgctgcagttccagctttccctttcgggacaggtactccagctgattgattatctgctgaagggtcttggttccacctcctggcacaatgcgaatgattacttgagcgcgatcgggcatccaattttctcccgtcaggtgcgtggtcaagtgctacaaggcacctttcagtaacgagcgaccgtcgatccgtcgccgggatacggacaaaatggagcgcagtagtccatcgagggcggcgaaagcctcgccaaaagcaatacgttcatctcgcacagcctccagatccgatcgagggtcttcggcgtaggcagatagaagcatggatacattgcttgagagtattccgatggactgaagtatggcttccatcttttctcgtgtgtctgcatctatttcgagaaagcccccgatgcggcgcaccgcaacgcgaattgccatactatccgaaagtcccagcaggcgcgcttgataggaaaaggtttcatactcggccgatcgcagacgggcactcacgaccttgaacccttcaactttcagggatcgatgctggttgatggtagtctcactcgacgtggctctggtgtgttttgacatagcttcctccaaagaaagcggaaggtctggatactccagcacgaaatgtgcccgggtagacggatggaagtctagccctgctcaatatgaaatcaacagtacatttacagtcaatactgaatatacttgctacatttgcaattgtcttataacgaatgtgaaataaaaatagtgtaacaacgcttttactcatcgataatcacaaaaacatttatacgaacaaaaatacaaatgcactccggtttcacaggataggcgggatcagaatatgcaacttttgacgttttgttctttcaaagggggtgctggcaaaaccaccgcactcatgggcctttgcgctgctttggcaaatgacggtaaacgagtggccctctttgatgccgacgaaaaccggcctctgacgcgatggagagaaaacgccttacaaagcagtactgggatcctcgctgtgaagtctattccgccgacgaaatgccccttcttgaagcagcctatgaaaatgccgagctcgaaggatttgattatgcgttggccgatacgcgtggcggctcgagcgagctcaacaacacaatcatcgctagctcaaacctgcttctgatccccaccatgctaacgccgctcgacatcgatgaggcactatctacctaccgctacgtcatcgagctgctgttgagtgaaaatttggcaattcctacagctgttttgcgccaacgcgtcccggtcggccgattgacaacatcgcaacgcaggatgtcagagacgctagagagccttccagttgtaccgtctcccatgcatgaaagagatgcatttgccgcgatgaaagaacgcggcatgttgcatcttacattactaaacacgggaactgatccgacgatgcgcctcatagagaggaatcttcggattgcgatggaggaagtcgtggtcatttcgaaactgatcagcaaaatcttggaggcttgaagatggcaattcgcaagcccgcattgtcggtcggcgaagcacggcggcttgctggtgctcgacccgagatccaccatcccaacccgacacttgttccccagaagctggacctccagcacttgcctgaaaaagccgacgagaaagaccagcaacgtgagcctctcgtcgccgatcacatttacagtcccgatcgacaacttaagctaactgtggatgcccttagtccacctccgtccccgaaaaagctccaggtttttctttcagcgcgaccgcccgcgcctcaagtgtcgaaaacatatgacaacctcgttcggcaatacagtccctcgaagtcgctacaaatgattttaaggcgcgcgttggacgatttcgaaagcatgctggcagatggatcatttcgcgtggccccgaaaagttatccgatcccttcaactacagaaaaatccgttctcgttcagacctcacgcatgttcccggttgcgttgctcgaggtcgctcgaagtcattttgatccgttggggttggagaccgctcgagctttcggccacaagctggctaccgccgcgctcgcgtcattctttgctggagagaagccatcgagcaattggtgaagagggacctatcggaacccctcaccaaatattgagtgtaggtttgaggccgctggccgcgtcctcagtcaccttttgagccagataattaagagccaaatgcaattggctcaggctgccatcgtccccccgtgcgaaacctgcacgtccgcgtcaaagaaataaccggcacctcttgctgtttttatcagttgagggcttgacggatccgcctcaagtttgcggcgcagccgcaaaatgagaacatctatactcctgtcgtaaacctcctcgtcgcgtactcgactggcaatgagaagttgctcgcgcgatagaacgtcgcggggtttctctaaaaacgcgaggagaagattgaactcacctgccgtaagtttcacctcaccgccagcttcggacatcaagcgacgttgcctgagattaagtgtccagtcagtaaaacaaaaagaccgtcggtctttggagcggacaacgttggggcgcacgcgcaaggcaacccgaatgcgtgcaagaaactctctcgtactaaacggcttagcgataaaatcacttgctcctagctcgagtgcaacaactttatccgtctcctcaaggcggtcgccactgataattatgattggaatatcagactttgccgccagatttcgaacgatctcaagcccatcttcacgacctaaatttagatcaacaaccacgacatcgaccgtcgcggaagagagtactctagtgaactgggtgctgtcggctaccgcggtcactttgaaggcgtggatcgtaaggtattcgataataagatgccgcatagcgacatcgtcatcgataagaagaacgtgtttcaacggctcacctttcaatctaaaatctgaacccttgttcacagcgcttgagaaattttcacgtgaaggatgtacaatcatctccagctaaatgggcagttcgtcagaattgcggctgaccgcggatgacgaaaatgcgaaccaagtatttcaattttatgacaaaagttctcaatcgttgttacaagtgaaacgcttcgaggttacagctactattgattaaggagatcgcctatggtctcgccccggcgtcgtgcgtccgccgcgagccagatctcgcctacttcataaacgtcctcataggcacggaatggaatgatgacatcgatcgccgtagagagcatgtcaatcagtgtgcgatcttccaagctagcaccttgggcgctacttttgacaagggaaaacagtttcttgaatccttggattggattcgcgccgtgtattgttgaaatcgatcccggatgtcccgagacgacttcactcagataagcccatgctgcatcgtcgcgcatctcgccaagcaatatccggtccggccgcatacgcagacttgcttggagcaagtgctcggcgctcacagcacccagcccagcaccgttcttggagtagagtagtctaacatgattatcgtgtggaatgacgagttcgagcgtatcttctatggtgattagcctttcctggggggggatggcgctgatcaaggtcttgctcattgttgtcttgccgcttccggtagggccacatagcaacatcgtcagtcggctgacgacgcatgcgtgcagaaacgcttccaaatccccgttgtcaaaatgctgaaggatagcttcatcatcctgattttggcgtttccttcgtgtctgccactggttccacctcgaagcatcataacgggaggagacttctttaagaccagaaacacgcgagcttggccgtcgaatggtcaagctgacggtgcccgagggaacggtcggcggcagacagatttgtagtcgttcaccaccaggaagttcagtggcgcagagggggttacgtggtccgacatcctgctttctcagcgcgcccgctaaaatagcgatatcttcaagatcatcataagagacgggcaaaggcatcttggtaaaaatgccggcttggcgcacaaatgcctctccaggtcgattgatcgcaatttcttcagtcttcgggtcatcgagccattccaaaatcggcttcagaagaaagcgtagttgcggatccacttccatttacaatgtatcctatctctaagcggaaatttgaattcattaagagcggcggttcctcccccgcgtggcgccgccagtcaggcggagctggtaaacaccaaagaaatcgaggtcccgtgctacgaaaatggaaacggtgtcaccctgattcttcttcagggttggcggtatgttgatggttgccttaagggctgtctcagttgtctgctcaccgttattttgaaagctgttgaagctcatcccgccacccgagctgccggcgtaggtgctagctgcctggaaggcgccttgaacaacactcaagagcatagctccgctaaaacgctgccagaagtggctgtcgaccgagcccggcaatcctgagcgaccgagttcgtccgcgcttggcgatgttaacgagatcatcgcatggtcaggtgtctcggcgcgatcccacaacacaaaaacgcgcccatctccctgttgcaagccacgctgtatttcgccaacaacggtggtgccacgatcaagaagcacgatattgttcgttgttccacgaatatcctgaggcaagacacactttacatagcctgccaaatttgtgtcgattgcggtttgcaagatgcacggaattattgtcccttgcgttaccataaaatcggggtgcggcaagagcgtggcgctgctgggctgcagctcggtgggtttcatacgtatcgacaaatcgttctcgccggacacttcgccattcggcaaggagttgtcgtcacgcttgccttcttgtcttcggcccgtgtcgccctgaatggcgcgtttgctgaccccttgatcgccgctgctatatgcaaaaatcggtgtttcttccggccgtggctcatgccgctccggttcgcccctcggcggtagaggagcagcaggctgaacagcctcttgaaccgctggaggatccggcggcacctcaatcggagctggatgaaatggcttggtgtttgttgcgatcaaagttgacggcgatgcgttctcattcaccttcttttggcgcccacctagccaaatgaggcttaatgataacgcgagaacgacacctccgacgatcaatttctgagaccccgaaagacgccggcgatgtttgtcggagaccagggatccagatgcatcaacctcatgtgccgcttgctgactatcgttattcatcccttcgcccccttcaggacgcgtttcacatcgggcctcaccgtgcccgtttgcggcctttggccaacgggatcgtaagcggtgttccagatacatagtactgtgtggccatccctcagacgccaacctcgggaaaccgaagaaatctcgacatcgctccctttaactgaatagttggcaacagcttccttgccatcaggattgatggtgtagatggagggtatgcgtacattgcccggaaagtggaataccgtcgtaaatccattgtcgaagacttcgagtggcaacagcgaacgatcgccttgggcgacgtagtgccaattactgtccgccgcaccaagggctgtgacaggctgatccaataaattctcagctttccgttgatattgtgcttccgcgtgtagtctgtccacaacagccttctgttgtgcctcccttcgccgagccgccgcatcgtcggcggggtaggcgaattggacgctgtaatagagatcgggctgctctttatcgaggtgggacagagtcttggaacttatactgaaaacataacggcgcatcccggagtcgcttgcggttagcacgattactggctgaggcgtgaggacctggcttgccttgaaaaatagataatttccccgcggtagggctgctagatctttgctatttgaaacggcaaccgctgtcaccgtttcgttcgtggcgaatgttacgaccaaagtagctccaaccgccgtcgagaggcgcaccacttgatcgggattgtaagccaaataacgcatgcgcggatctagcttgcccgccattggagtgtcttcagcctccgcaccagtcgcagcggcaaataaacatgctaaaatgaaaagtgcttttctgatcatggttcgctgtggcctacgtttgaaacggtatcttccgatgtctgataggaggtgacaaccagacctgccgggttggttagtctcaatctgccgggcaagctggtcaccttttcgtagcgaactgtcgcggtccacgtactcaccacaggcattttgccgtcaacgacgagggtccttttatagcgaatttgctgcgtgcttggagttacatcatttgaagcgatgtgctcgacctccaccctgccgcgtttgccaagaatgacttgaggcgaactgggattgggatagttgaagaattgctggtaatcctggcgcactgttggggcactgaagttcgataccaggtcgtaggcgtactgagcggtgtcggcatcataactctcgcgcaggcgaacgtactcccacaatgaggcgttaacgacggcctcctcttgagttgcaggcaatcgcgagacagacacctcgctgtcaacggtgccgtccggccgtatccatagatatacgggcacaagcctgctcaacggcaccattgtggctatagcgaacgcttgagcaacatttcccaaaatcgcgatagctgcgacagctgcaatgagtttggagagacgtcgcgccgatttcgctcgcgcggtttgaaaggcttctacttccttatagtgctcggcaaggctttcgcgcgccactagcatggcatattcaggccccgtcatagcgtccacccgaattgccgagctgaagatctgacggagtaggctgccatcgccccacattcagcgggaagatcgggcctttgcagctcgctaatgtgtcgtttgtctggcagccgctcaaagcgacaactaggcacagcaggcaatacttcatagaattctccattgaggcgaatttttgcgcgacctagcctcgctcaacctgagcgaagcgacggtacaagctgctggcagattgggttgcgccgctccagtaactgcctccaatgttgccggcgatcgccggcaaagcgacaatgagcgcatcccctgtcagaaaaaacatatcgagttcgtaaagaccaatgatcttggccgcggtcgtaccggcgaaggtgattacaccaagcataagggtgagcgcagtcgcttcggttaggatgacgatcgttgccacgaggtttaagaggagaagcaagagaccgtaggtgataagttgcccgatccacttagctgcgatgtcccgcgtgcgatcaaaaatatatccgacgaggatcagaggcccgatcgcgagaagcactttcgtgagaattccaacggcgtcgtaaactccgaaggcagaccagagcgtgccgtaaaggacccactgtgccccttggaaagcaaggatgtcctggtcgttcatcggaccgatttcggatgcgattttctgaaaaacggcctgggtcacggcgaacattgtatccaactgtgccggaacagtctgcagaggcaagccggttacactaaactgctgaacaaagtttgggaccgtcttttcgaagatggaaaccacatagtcttggtagttagcctgcccaacaattagagcaacaacgatggtgaccgtgatcacccgagtgataccgctacgggtatcgacttcgccgcgtatgactaaaataccctgaacaataatccaaagagtgacacaggcgatcaatggcgcactcaccgcctcctggatagtctcaagcatcgagtccaagcctgtcgtgaaggctacatcgaagatcgtatgaatggccgtaaacggcgccggaatcgtgaaattcatcgattggacctgaacttgactggtttgtcgcataatgttggataaaatgagctcgcattcggcgaggatgcgggcggatgaacaaatcgcccagccttaggggagggcaccaaagatgacagcggtcttttgatgctccttgcgttgagcggccgcctcttccgcctcgtgaaggccggcctgcgcggtagtcatcgttaataggcttgtcgcctgtacattttgaatcattgcgtcatggatctgcttgagaagcaaaccattggtcacggttgcctgcatgatattgcgagatcgggaaagctgagcagacgtatcagcattcgccgtcaagcgtttgtccatcgtttccagattgtcagccgcaatgccagcgctgtttgcggaaccggtgatctgcgatcgcaacaggtccgcttcagcatcactacccacgactgcacgatctgtatcgctggtgatcgcacgtgccgtggtcgacattggcattcgcggcgaaaacatttcattgtctaggtccttcgtcgaaggatactgatttttctggttgagcgaagtcagtagtccagtaacgccgtaggccgacgtcaacatcgtaaccatcgctatagtctgagtgagattctccgcagtcgcgagcgcagtcgcgagcgtctcagcctccgttgccgggtcgctaacaacaaactgcgcccgcgcgggctgaatatatagaaagctgcaggtcaaaactgttgcaataagttgcgtcgtcttcatcgtttcctaccttatcaatcttctgcctcgtggtgacgggccatgaattcgctgagccagccagatgagttgccttcttgtgcctcgcgtagtcgagttgcaaagcgcaccgtgttggcacgccccgaaagcacggcgacatattcacgcatatcccgcagatcaaattcgcagatgacgcttccactttctcgtttaagaagaaacttacggctgccgaccgtcatgtcttcacggatcgcctgaaattccttttcggtacatttcagtccatcgacataagccgatcgatctgcggttggtgatggatagaaaatcttcgtcatacattgcgcaaccaagctggctcctagcggcgattccagaacatgctctggttgctgcgttgccagtattagcatcccgttgttttttcgaacggtcaggaggaatttgtcgacgacagtcgaaaatttagggtttaacaaataggcgcgaaactcatcgcagctcatcacaaaacggcggccgtcgatcatggctccaatccgatgcaggagatatgctgcagcgggagcgcatacttcctcgtattcgagaagatgcgtcatgtcgaagccggtaatcgacggatctaactttacttcgtcaacttcgccgtcaaatgcccagccaagcgcatggccccggcaccagcgttggagccgcgctcctgcgccttcggcgggcccatgcaacaaaaattcacgtaaccccgcgattgaacgcatttgtggatcaaacgagagctgacgatggataccacggaccagacggcggttctcttccggagaaatcccaccccgaccatcactctcgatgagagccacgatccattcgcgcagaaaatcgtgtgaggctgctgtgttttctaggccacgcaacggcgccaacccgctgggtgtgcctctgtgaagtgccaaatatgttcctcctgtggcgcgaaccagcaattcgccaccccggtccttgtcaaagaacacgaccgtacctgcacggtcgaccatgctctgttcgagcatggctagaacaaacatcatgagcgtcgtcttacccctcccgataggcccgaatattgccgtcatgccaacatcgtgctcatgcgggatatagtcgaaaggcgttccgccattggtacgaaatcgggcaatcgcgttgccccagtggcctgagctggcgccctctggaaagttttcgaaagagacaaaccctgcgaaattgcgtgaagtgattgcgccagggcgtgtgcgccacttaaaattccccggcaattgggaccaataggccgcttccataccaataccttcttggacaaccacggcacctgcatccgccattcgtgtccgagcccgcgcgcccctgtccccaagactattgagatcgtctgcatagacgcaaaggctcaaatgatgtgagcccataacgaattcgttgctcgcaagtgcgtcctcagcctcggataatttgccgatttgagtcacggctttatcgccggaactcagcatctggctcgatttgaggctaagtttcgcgtgcgcttgcgggcgagtcaggaacgaaaaactctgcgtgagaacaagtggaaaatcgagggatagcagcgcgttgagcatgcccggccgtgtttttgcagggtattcgcgaaacgaatagatggatccaacgtaactgtcttttggcgttctgatctcgagtcctcgcttgccgcaaatgactctgtcggtataaatcgaagcgccgagtgagccgctgacgaccggaaccggtgtgaaccgaccagtcatgatcaaccgtagcgcttcgccaatttcggtgaagagcacaccctgcttctcgcggatgccaagacgatgcaggccatacgctttaagagagccagcgacaacatgccaaagatcttccatgttcctgatctggcccgtgagatcgttttccctttttccgcttagcttggtgaacctcctctttaccttccctaaagccgcctgtgggtagacaatcaacgtaaggaagtgttcattgcggaggagttggccggagagcacgcgctgttcaaaagcttcgttcaggctagcggcgaaaacactacggaagtgtcgcggcgccgatgatggcacgtcggcatgacgtacgaggtgagcatatattgacacatgatcatcagcgatattgcgcaacagcgtgttgaacgcacgacaacgcgcattgcgcatttcagtttcctcaagctcgaatgcaacgccatcaattctcgcaatggtcatgatcgatccgtcttcaagaaggacgatatggtcgctgaggtggccaatataagggagatagatctcaccggatctttcggtcgttccactcgcgccgagcatcacaccattcctctccctcgtgggggaaccctaattggatttgggctaacagtagcgcccccccaaactgcactatcaatgcttcttcccgcggtccgcaaaaatagcaggacgacgctcgccgcattgtagtctcgctccacgatgagccgggctgcaaaccataacggcacgagaacgacttcgtagagcgggttctgaacgataacgatgacaaagccggcgaacatcatgaataaccctgccaatgtcagtggcaccccaagaaacaatgcgggccgtgtggctgcgaggtaaagggtcgattcttccaaacgatcagccatcaactaccgccagtgagcgtttggccgaggaagctcgccccaaacatgataacaatgccgccgacgacgccggcaaccagcccaagcgaagcccgcccgaacatccaggagatcccgatagcgacaatgccgagaacagcgagtgactggccgaacggaccaaggataaacgtgcatatattgttaaccattgtggcggggtcagtgccgccacccgcagattgcgctgcggcgggtccggatgaggaaatgctccatgcaattgcaccgcacaagcttggggcgcagctcgatatcacgcgcatcatcgcattcgagagcgagaggcgatttagatgtaaacggtatctctcaaagcatcgcatcaatgcgcacctccttagtataagtcgaataagacttgattgtcgtctgcggatttgccgttgtcctggtgtggcggtggcggagcgattaaaccgccagcgccatcctcctgcgagcggcgctgatatgacccccaaacatcccacgtctcttcggattttagcgcctcgtgatcgtcttttggaggctcgattaacgcgggcaccagcgattgagcagctgtttcaacttttcgcacgtagccgtttgcaaaaccgccgatgaaattaccggtgttgtaagcggagatcgcccgacgaagcgcaaattgcttctcgtcaatcgtttcgccgcctgcataacgacttttcagcatgtttgcagcggcagataatgatgtgcacgcctggagcgcaccgtcaggtgtcagaccgagcatagaaaaatttcgagagtttatttgcatgaggccaacatccagcgaatgccgtgcatcgagacggtgcctgacgacttgggttgcttggctgtgatcttgccagtgaagcgtttcgccggtcgtgttgtcatgaatcgctaaaggatcaaagcgactctccaccttagctatcgccgcaagcgtagatgtcgcaactgatggggcacacttgcgagcaacatggtcaaactcagcagatgagagtggcgtggcaaggctcgacgaacagaaggagaccatcaaggcaagagaaagcgaccccgatctcttaagcataccttatctccttagctcgcaactaacaccgcctctcccgttggaagaagtgcgttgttttatgttgaagattatcgggagggtcggttactcgaaaattttcaattgcttctttatgatttcaattgaagcgagaaacctcgcccggcgtcttggaacgcaacatggaccgagaaccgcgcatccatgactaagcaaccggatcgacctattcaggccgcagttggtcaggtcaggctcagaacgaaaatgctcggcgaggttacgctgtctgtaaacccattcgatgaacgggaagcttccttccgattgctcttggcaggaatattggcccatgcctgcttgcgctttgcaaatgctcttatcgcgttggtatcatatgccttgtccgccagcagaaacgcactctaagcgattatttgtaaaaatgtttcggtcatgcggcggtcatgggcttgacccgctgtcagcgcaagacggatcggtcaaccgtcggcatcgacaacagcgtgaatcttggtggtcaaaccgccacgggaacgtcccatacagccatcgtcttgatcccgctgtttcccgtcgccgcatgttggtggacgcggacacaggaactgtcaatcatgacgacattctatcgaaagccttggaaatcacactcagaatatgatcccagacgtctgcctcacgccatcgtacaaagcgattgtagcaggttgtacaggaaccgtatcgatcaggaacgtctgcccagggcgggcccgtccggaagcgccacaagatgacattgatcacccgcgtcaacgcgcggcacgcgacgcggcttatttgggaacaaaggactgaacaacagtccattcgaaatcggtgacatcaaagcggggacgggttatcagtggcctccaagtcaagcctcaatgaatcaaaatcagaccgatttgcaaacctgatttatgagtgtgcggcctaaatgatgaaatcgtccttctagatcgcctccgtggtgtagcaacacctcgcagtatcgccgtgctgaccttggccagggaattgactggcaagggtgctttcacatgaccgctcttttggccgcgatagatgatttcgttgctgctttgggcacgtagaaggagagaagtcatatcggagaaattcctcctggcgcgagagcctgctctatcgcgacggcatcccactgtcgggaacagaccggatcattcacgaggcgaaagtcgtcaacacatgcgttataggcatcttcccttgaaggatgatcttgttgctgccaatctggaggtgcggcagccgcaggcagatgcgatctcagcgcaacttgcggcaaaacatctcactcacctgaaaaccactagcgagtctcgcgatcagacgaaggccttttacttaacgacacaatatccgatgtctgcatcacaggcgtcgctatcccagtcaatactaaagcggtgcaggaactaaagattactgatgacttaggcgtgccacgaggcctgagacgacgcgcgtagacagttttttgaaatcattatcaaagtgatggcctccgctgaagcctatcacctctgcgccggtctgtcggagagatgggcaagcattattacggtcttcgcgcccgtacatgcattggacgattgcagggtcaatggatctgagatcatccagaggattgccgcccttaccttccgtttcgagttggagccagcccctaaatgagacgacatagtcgacttgatgtgacaatgccaagagagagatttgcttaacccgatttttttgctcaagcgtaagcctattgaagcttgccggcatgacgtccgcgccgaaagaatatcctacaagtaaaacattctgcacaccgaaatgcttggtgtagacatcgattatgtgaccaagatccttagcagtttcgcttggggaccgctccgaccagaaataccgaagtgaactgacgccaatgacaggaatcccttccgtctgcagataggtaccatcgatagatctgctgcctcgcgcgtttcggtgatgacggtgaaaacctctgacacatgcagctcccggagacggtcacagcttgtctgtaagcggatgccgggagcagacaagcccgtcagggcgcgtcagcgggtgttggcgggtgtcggggcgcagccatgacccagtcacgtagcgatagcggagtgtatactggcttaactatgcggcatcagagcagattgtactgagagtgcaccatatgcggtgtgaaataccgcacagatgcgtaaggagaaaataccgcatcaggcgctcttccgcttcctcgctcactgactcgctgcgctcggtcgttcggctgcggcgagcggtatcagctcactcaaaggcggtaatacggttatccacagaatcaggggataacgcaggaaagaacatgtgagcaaaaggccagcaaaaggccaggaaccgtaaaaaggccgcgttgctggcgtttttccataggctccgcccccctgacgagcatcacaaaaatcgacgctcaagtcagaggtggcgaaacccgacaggactataaagataccaggcgtttccccctggaagctccctcgtgcgctctcctgttccgaccctgccgcttaccggatacctgtccgcctttctcccttcgggaagcgtggcgctttctcatagctcacgctgtaggtatctcagttcggtgtaggtcgttcgctccaagctgggctgtgtgcacgaaccccccgttcagcccgaccgctgcgccttatccggtaactatcgtcttgagtccaacccggtaagacacgacttatcgccactggcagcagccactggtaacaggattagcagagcgaggtatgtaggcggtgctacagagttcttgaagtggtggcctaactacggctacactagaaggacagtatttggtatctgcgctctgctgaagccagttaccttcggaaaaagagttggtagctcttgatccggcaaacaaaccaccgctggtagcggtggtttttttgtttgcaagcagcagattacgcgcagaaaaaaaggatctcaagaagatcctttgatcttttctacggggtctgacgctcagtggaacgaaaactcacgttaagggattttggtcatgagattatcaaaaaggatcttcacctagatccttttaaattaaaaatgaagttttaaatcaatctaaagtatatatgagtaaacttggtctgacagttaccaatgcttaatcagtgaggcacctatctcagcgatctgtctatttcgttcatccatagttgcctgactccccgtcgtgtagataactacgatacgggagggcttaccatctggccccagtgctgcaatgataccgcgagacccacgctcaccggctccagatttatcagcaataaaccagccagccggaagggccgagcgcagaagtggtcctgcaactttatccgcctccatccagtctattaattgttgccgggaagctagagtaagtagttcgccagttaatagtttgcgcaacgttgttgccattgctgcaggggggggggggggggggttccattgttcattccacggacaaaaacagagaaaggaaacgacagaggccaaaaagctcgctttcagcacctgtcgtttcctttcttttcagagggtattttaaataaaaacattaagttatgacgaagaagaacggaaacgccttaaaccggaaaattttcataaatagcgaaaacccgcgaggtcgccgccccgtaacct

SEQ ID NO: 21 - DNA, 58259 bp, artificial
  PHP40973
gtttacccgccaatatatcctgtcaaacactgatagtttaaactgaaggcgggaaacgacaatctgatcatgagcggagaattaagggagtcacgttatgacccccgccgatgacgcgggacaagccgttttacgtttggaactgacagaaccgcaacgttgaaggagccactcagcaagctggtacgattgtaatacgactcactatagggcgaattgagcgctgtttaaacgctcttcaactggaagagcggttaccagagctggtcacctttgtccaccaagatggaactgcggccgctcattaattaagtcaggcgcgcctctagttgaagacacgttcatgtcttcatcgtaagaagacactcagtagtcttcggccagaatggccatctggattcagcaggcctagaaggccatttaaatcctgaggatctggtcttcctaaggacccgggatatcgctatcaactttgtatagaaaagttgggccgaattcgagctcggtacggccagaatggcccggaccgggttaccgaattcgagctcggtaccctgggatccgagctctcccatatggtcgacctgcaggcggccgcgaattcactagtaacggccgccagtgtgctggaattcgcccttgagctccctttaatctggcgctagatctgcatccgcggcttgcaaagataaatggcacatttagtgtgttattttgcaatacctttcatagtagatatccttaaatgcagttttaggcatgtttgggtaattaaataacatttttaggaggagttttagatttacctttctttcgtgatgactgatgacagacgtggggaattcaaatgcaactctagcgaaagttcatatatttttcataaatagctgaggctggggtaattattttttgtagaaaaatagaataggtggaatggtttggggaaggcgtaggcgctcgtggacgacgccccataaaagacaagaggcggaattgccatgaattcgaggtagctaagtaaggcgcatatatatgccaaaaattctactgtcactttccaatttcaatgcgctgccaaacaagccgccgacccatggatactgacttgaattcagcccaattctgtagatccaaacagggccggcgtcagtgcctcaggtgagagagcagcagacgatgcaaagagccaaaagtggaagcagacgcagccgaagccgaagcccaagcccaaaactgttttgtctttgcccagaaccgcgacgagcctaaactgccgcttcctcctatctacaagtccctggcacatcacgcatagtccaaccatggcgcgcaggcgataaggcgcgccacggggacgcgacatgtggtggcggacgcgatcaggatagggccaggctggccgggcgcggccacgggagaacggtggccactcgtcccacatccgcttcgtcctgtcctgtactgcgtcctgcccccaacgagagccggagccggccatcccgtcgcacactctccccctctatatatgccgtcggtgtgggggagcctactacaggacgacccaagcaagcaagcaagcagcgagtacatacatactaggcagccaggcagtcaagcttatggcggccgccttctcctccaccgtcggagctccggtgggtgaccgcgcgtgttaattccaagcatctgctagctgctctgctactagttcagcgtcgggatcttcttcttcatgcatgcatttcatgatcatatatatatctcgatccttgagaccttcttgacggcatatatatgtatatgtacatgcatcatgcatcgaccgatcatcaggcctccaccccgaccaggagcagcttcctcgggaagaagctcaacaagccgcaggtgtcgtccgcggccgtgacctatcatggcaagagctccagcagcaacagcaggttcaaggccatggctgccaaggaagtcgatgaaacaaaacaatcggaccaggatcgttggaaaggcctggcctacgacatctcggacgaccagcaggacatcaccaggggcaagggcctcgtcgacaacctcttccaggcgcctaccggggacggcacccacgtcgccgtgctcagctcctacgactacatcagccagggccaaaagacctacaacttcgacaacatgatggatggcttctacatatccaagagcttcatggacaagctcgtcgtccatttgagcaaaaattttatgtccctgccaaacatcaaggttcccctcatcctgggtatctggggaggcaaaggccagggaaaatcgttccaatgcgagctggtcttctccaagatgggcatcatgtacgttaatttatttcgattcgtctattattattgtcttcgataatatatactagctagctagtagtaaatcattccaatgcatgcatgcatgcagccccatcatgatgagcgccggcgagctggagagcggcaacgccggagagcccgccaagctcatcaggcagcgctaccgtgaggccgccgacctgatcaagaagggcaagatgtcctgcctcttcatcaacgacctcgacgccggcgcgggtcgcatgggcggcaccacccagtacacggtgaacaaccagatggtcaacgccaccctgatgaacatcgccgacaaccccaccaacgtgcggctcccggggatgtacaacaaggaggacaacccccgcgtgcccatcatcgtcaccggcaacgacttctccacgctctacgcgccgctcatccgcgacggccgcatggagaagttctactgggcgcccacccgcgaggaccgcatcggcatctgcaagggcatcttccgcaccgacggcgtcgacgaggagcacgtcgtccgtctggtcgacaccttccctggccagtccatcgacttcttcggcgcgctgcgtgcccgggtctacgacgacgaggtccgaaagtgggtgagcgagaccggcgtcgagaacatcgccaagaagctcgtcaactccaaggagggcccgcccacgttcgagcagcccaagatgacgatcgagaagctcttggagtacggacacatgctggtggcggagcaggagaacgtcaagcgtgtgcagcttgctgacaagtacctcaacgaggctgctcttggtgaagccaacgaggacgccatgaagactggctccttcttcaagtagatcgatagacttgtccatcttctggattggccaacttaattaatgtatgaaataaaaggatgcacacatagtgacatgctaatcactataatgtgggcatcaaagttgtgtgttatgtgtaattactagttatctgaataaaagagaaagagatcatccatatttcttatcctaaatgaatgtcacgtgtctttataattctttgatgaaccagatgcatttcattaaccaaatccatatacatataaatattaatcatatataattaatatcaattgggttagcaaaacaaatctagtctaggtgtgttttgcgaatgcggcctcaagtttgtacaaaaaagcaggctccggccagaatggcccggaccgggttaccgaattcgagctcggtaccaggtttttgtgatctgatgataagtggttggttcgtgtctcatgcacttgggaggtgatctatttcacctggtgtagtttgtgtttccgtcagttggaaaaacttatccctatcgatttcgttttcattttctgcttttcttttatgtaccttcgtttgggcttgtaacgggcctttgtatttcaactctcaataataatccaagtgcatgttaaacaatttgtcatctgtttcggctttgatatactactggtgaagatgggccgtactactgcatcacaacgaaaaataataataagatgaaaaacttgaagtggaaaaaaaaaaaaacttgaatgttcactactactcattgaccataatgtttaacatacatagctcaatagtatttttgtgaatatggcaacacaaacagtccaaaacaattgtctcttactataccaaaccaagggcgccgcttgtttgccactctttgtgtgcaatagtgtgattaccacatctccacattcaatatattccctgaattatctgacgattttgatggctcactgttttcccaagtcttgaattgtcttctgtgcgccagtcaaatgcatatgtgttgagtttatcttttaaatatcaagcttttgtttttaacttttgtttgtaaccaaaaactcacagtaggagtttgatcacataattttatgtttgcctttgcaatttctagtgagtctttgattaaaagcttgaaaagaaaatgcagccaagcttaccaagtaagttatgtgtattaaccagaggaagagagaatcttgcaaaatttcaacaaacacaaaaagaagtattactacgattggtggagaaagaaaacgattccaaatcttgaactgttgttgtaaaagcatagcagaaagtgggagacaaccgaaatagaaatgactataacttaatttaatgttatcattataatttcttctagcaaatatttagaaagtaaatatcacatcaacctttaatgtaattaagctttctctttttgattcatgtgagatgaaaagaaaaaaaagaagagaaaagtgtagaaaacacatcatttctaagctgaaggtacatagtacccttgtacttttggtttcacctgcatagagaaaacccacaagaatatgacagtctgatttgtcagtctcattctcaagcaacatttctctatccgttactttcatggtgaataacacaatccatcatcaatactttgtgttactcagaaactgaaagttattccgagtcttgcatatctttggacctactcgtttttctaccattattgctgattgttaagctctcgctacttgaatcggcattgttggagtgggaaggttcaaaaaattggagttatgactagttgtctctttctatgtacgatggagaaaatgaataaacaactgagaaaatggctcttgtttagttgatgatgctcttaagctttccactggttgccatatatgatttgggcatttcactttgatcttaatgggccttgtaaagcccaagactcatgattatctttagttgatgctcttaattaggtgtgggcaaataattcaaactgtatgtacccgaccaaaaccaaagcaaaaataatcgaaccaaaccgaaaatttaaaaataaccgaatgaaaactaaatcctataactgaaagaactgaaaccgaatcaaaatatttaatgtaaccaaaaatatccgaaatataattatattgtcaaaaatattaataatttctagattaaataattaaaaatacttaaaaatttatataaaatagtaaaaatactcgaaaataaccacaaatattcaaaaacaaccgaaatatcccaaaatattcaaagcaaaataaccgaatggataccaaattttaaaaccgaaaaaactggaacaaaaccaaaatcgaaccaaaatttcaaaaatcgaataaatactaaactttagaacaaaaaaaaacgataaccgaatgtatacgaaccaaagccgaattagataaccgaacgtccaggactactcttaatctttccgccacttatgatttgggctattactttgtttataatgagccttttcaagctcaagttcatgattgtccgtgagatgagaaactgacttgttggattcgaaaccctagctagtattggttaatacttaatacataaatgacctgcattgacatcatcatccaagaaaataaaaattgtatgcttgagatatttagttttcctagctaggttttctttattttagtaccgaatctttaggtgtgccacgttaatttagacccattttttcatacttaccaactgagtctagtttaatcatgactataatcgtataaaatgattcagtcgacgtcattgcgaacgtatataaaatcatccaaattgacgtcattccaaagaggtaagcatgcttatctaagagtccgagcatactaaacaagacgacattttatttgcactccaaatcaaattttgtattgcctaaagaaaaacaatcaaactcaagtttcttaaaattaatttcattcaaactaatcactttcaatatctcacatattattcatgccatttctatttgtctaaacatgatttaaaaaaaaaagtaaaatacaaagattactatgcaaaaactctataaaaaaaaattcaaatttcttatttatttgtgacatcaaattttcaaaataatttttttaattatcggttgatccggtcagtcgataaaaacataaactttcagcgaccgttaaaactttcctactaccgatttagagaaaatcttagcttgaaacgtaattgtaacctgccttcatgcaagtcgcaagatatgtcatcctaagttgtatatgttttctcaaaagatgtatttacttgagaaaatacgtttcaacgttgatggacaaccaattaagaatcaagcacctttcgtaatcaatttaggcttatcgtctaaggtatactgatttacgacagttgactagacttataaggaacaaaataatagaataatttcgtcaagaaaaattgattttggactcatactttacataatattttactcttaaatttatttaagtggctcctcgcatgatcccaaagagcaagcctagactatatggaaaagtttctaaacacttcacctaatcatagagactaagatggtaattcgtaaacgacaaagcctagtgacactgtccattgtaaaattccacatcatattagtattaaacatatacatgtagtttcctgaacacatgtagtatcaaacacacttcgtggcttcttcctcgaaacctggtaccctgggatctgtgcagcgtgacccggtcgtgcccctctctagagataatgagcattgcatgtctaagttataaaaaattaccacatattttttttgtcacacttgtttgaagtgcagtttatctatctttatacatatatttaaactttactctacgaataatataatctatagtactacaataatatcagtgttttagagaatcatataaatgaacagttagacatggtctaaaggacaattgagtattttgacaacaggactctacagttttatctttttagtgtgcatgtgttctcctttttttttgcaaatagcttcacctatataatacttcatccattttattagtacatccatttagggtttagggttaatggtttttatagactaatttttttagtacatctattttattctattttagcctctaaattaagaaaactaaaactctattttagtttttttatttaataatttagatataaaatagaataaaataaagtgactaaaaattaaacaaataccctttaagaaattaaaaaaactaaggaaacatttttcttgtttcgagtagataatgccagcctgttaaacgccgtcgacgagtctaacggacaccaaccagcgaaccagcagcgtcgcgtcgggccaagcgaagcagacggcacggcatctctgtcgctgcctctggacccctctcgagagttccgctccaccgttggacttgctccgctgtcggcatccagaaattgcgtggcggagcggcagacgtgagccggcacggcaggcggcctcctcctcctctcacggcaccggcagctacgggggattcctttcccaccgctccttcgctttcccttcctcgcccgccgtaataaatagacaccccctccacaccctctttccccaacctcgtgttgttcggagcgcacacacacacaaccatatctcccccaaatccacccgtcggcacctccgcttcaaggtacgccgctcgtcctcccccccccccctctctaccttctctagatcggcgttccggtccatgcatggttagggcccggtagttctacttctgttcatgtttgtgttagatccgtgtttgtgttagatccgtgctgctagcgttcgtacacggatgcgacctgtacgtcagacacgttctgattgctaacttgccagtgtttctctttggggaatcctgggatggctctagccgttccgcagacgggatcgatttcatgattttttttgtttcgttgcatagggtttggtttgcccttttcctttatttcaatatatgccgtgcacttgtttgtcgggtcatcttttcatgcttttttttgtcttggttgtgatgatgtggtctggttgggcggtcgttctagatcggagtagaattctgtttcaaactacctggtggatttattaattttggatctgtatgtgtgtgccatacatattcatagttacgaattgaagatgatggatggaaatatcgatctaggataggtatacatgttgatgcgggttttactgatgcatatacagagatgctttttgttcgcttggttgtgatgatgtggtgtggttgggcggtcgttcattcgttctagatcggagtagaatactgtttcaaactacctggtgtatttattaattttggaactgtatgtgtgtgtcatacatcttcatagttacgagtttaagatggatggaaatatcgatctaggataggtatacatgttgatgtgggttttactgatgcatatacatgatggcatatgcagcatctattcatatgctctaaccttgagtacctatctattataataaacaagtatgttttataattattttgatcttgatatacttggatgatggcatatgcagcagctatatgtggatttttttagccctgccttcatacgctatttatttgcttggtactgtttcttttgtcgatgctcaccctgttgtttggtgttacttctgcagggatccccctccacacagagaagcaaagaaaccacaccacagtcgtaggggaagggagaggagggagggtggcttctgctgggttgccatgtgctatgaggtagagaacgggatgtctgcttcgtctcgtccacctctcctggaacctggaggcgtctcagcttgctgtgctgtggcttagaacttagtgggtggacgaagacgaagcagccacctagttctcttcctctcgtgtatggccctcaagcaccgtcaagagatctaggacctgcattcatatatcatcagcccactccagaggaaacgtaagggcaagtatgcatctaacctcaagttgacatatttctatttctcctgcaattttgggtcttccaaaaaaatcagaaatttgagatatatgaatattattacaaacatacagggcttgcatacaatacaagcccaagccccatctggcatcatacgtcaaatttcatacatgcatctgtcagacaatatatatcctcactattttgtaccattatcgcatgctaatctttgatgtttgatggaaaagagccacttacttgtatcccctattcgcctgatggcgatacagacgaaaaggccaaatcgaagtacagcaggcgctgcacgacaagattcctcgaggctcctgatgctcagcaacagcaaattaaatgtcgtcatagcatctacagtaattaaattgtgtggcatacaaaagaaaacatgtactagcatgcatgacaggatatcggggcagaaaggtagcatcagctagcgttggagttgatgcgtaccatgttgagaaagtgttgcattcttttattcaaagggggcaaaatgaatagacgataggttacccatggagacttgtccatcttctggattggccaacttaattaatgtatgaaataaaaggatgcacacatagtgacatgctaatcactataatgtgggcatcaaagttgtgtgttatgtgtaattactagttatctgaataaaagagaaagagatcatccatatttcttatcctaaatgaatgtcacgtgtctttataattctttgatgaaccagatgcatttcattaaccaaatccatatacatataaatattaatcatatataattaatatcaattgggttagcaaaacaaatctagtctaggtgtgttttgcgaatgcggcccccgggcacccagctttcttgtacaaagtggccgttaacggatcggccagaatggcccggaccgaagctggccgctctagaactagtggatctcgatgtgtagtctacgagaagggttaaccgtctcttcgtgagaataaccgtggcctaaaaataagccgatgaggataaataaaatgtggtggtacagtacttcaagaggtttactcatcaagaggatgcttttccgatgagctctagtagtacatcggacctcacatacctccattgtggtgaaatattttgtgctcatttagtgatgggtaaattttgtttatgtcactctaggttttgacatttcagttttgccactcttaggttttgacaaataatttccattccgcggcaaaagcaaaacaattttattttacttttaccactcttagctttcacaatgtatcacaaatgccactctagaaattctgtttatgccacagaatgtgaaaaaaaacactcacttatttgaagccaaggtgttcatggcatggaaatgtgacataaagtaacgttcgtgtataagaaaaaattgtactcctcgtaacaagagacggaaacatcatgagacaatcgcgtttggaaggctttgcatcacctttggatgatgcgcatgaatggagtcgtctgcttgctagccttcgcctaccgcccactgagtccgggcggcaactaccatcggcgaacgacccagctgacctctaccgaccggacttgaatgcgctaccttcgtcagcgacgatggccgcgtacgctggcgacgtgcccccgcatgcatggcggcacatggcgagctcagaccgtgcgtggctggctacaaatacgtaccccgtgagtgccctagctagaaacttacacctgcaactgcgagagcgagcgtgtgagtgtagccgagtagatcccccggtcgccaccatggcctcctccgagaacgtcatcaccgagttcatgcgcttcaaggtgcgcatggagggcaccgtgaacggccacgagttcgagatcgagggcgagggcgagggccgcccctacgagggccacaacaccgtgaagctgaaggtgaccaagggcggccccctgcccttcgcctgggacatcctgtccccccagttccagtacggctccaaggtgtacgtgaagcaccccgccgacatccccgactacaagaagctgtccttccccgagggcttcaagtgggagcgcgtgatgaacttcgaggacggcggcgtggcgaccgtgacccaggactcctccctgcaggacggctgcttcatctacaaggtgaagttcatcggcgtgaacttcccctccgacggccccgtgatgcagaagaagaccatgggctgggaggcctccaccgagcgcctgtacccccgcgacggcgtgctgaagggcgagacccacaaggccctgaagctgaaggacggcggccactacctggtggagttcaagtccatctacatggccaagaagcccgtgcagctgcccggctactactacgtggacgccaagctggacatcacctcccacaacgaggactacaccatcgtggagcagtacgagcgcaccgagggccgccaccacctgttcctgtagcggcccatggatattcgaacgcgtaggtaccacatggttaacctagacttgtccatcttctggattggccaacttaattaatgtatgaaataaaaggatgcacacatagtgacatgctaatcactataatgtgggcatcaaagttgtgtgttatgtgtaattactagttatctgaataaaagagaaagagatcatccatatttcttatcctaaatgaatgtcacgtgtctttataattctttgatgaaccagatgcatttcattaaccaaatccatatacatataaatattaatcatatataattaatatcaattgggttagcaaaacaaatctagtctaggtgtgttttgcgaatgcggccgccaccgcggtggagctcgaattccggtccgggcctagaaggccagcttcggccgccccgggcaactttattatacaaagttgatagatatcggaccgattaaactttaattcggtccgaagcttgcatgcctgcagtgcagcgtgacccggtcgtgcccctctctagagataatgagcattgcatgtctaagttataaaaaattaccacatattttttttgtcacacttgtttgaagtgcagtttatctatctttatacatatatttaaactttactctacgaataatataatctatagtactacaataatatcagtgttttagagaatcatataaatgaacagttagacatggtctaaaggacaattgagtattttgacaacaggactctacagttttatctttttagtgtgcatgtgttctcctttttttttgcaaatagcttcacctatataatacttcatccattttattagtacatccatttagggtttagggttaatggtttttatagactaatttttttagtacatctattttattctattttagcctctaaattaagaaaactaaaactctattttagtttttttatttaataatttagatataaaatagaataaaataaagtgactaaaaattaaacaaataccctttaagaaattaaaaaaactaaggaaacatttttcttgtttcgagtagataatgccagcctgttaaacgccgtcgacgagtctaacggacaccaaccagcgaaccagcagcgtcgcgtcgggccaagcgaagcagacggcacggcatctctgtcgctgcctctggacccctctcgagagttccgctccaccgttggacttgctccgctgtcggcatccagaaattgcgtggcggagcggcagacgtgagccggcacggcaggcggcctcctcctcctctcacggcaccggcagctacgggggattcctttcccaccgctccttcgctttcccttcctcgcccgccgtaataaatagacaccccctccacaccctctttccccaacctcgtgttgttcggagcgcacacacacacaaccagatctcccccaaatccacccgtcggcacctccgcttcaaggtacgccgctcgtcctcccccccccccctctctaccttctctagatcggcgttccggtccatgcatggttagggcccggtagttctacttctgttcatgtttgtgttagatccgtgtttgtgttagatccgtgctgctagcgttcgtacacggatgcgacctgtacgtcagacacgttctgattgctaacttgccagtgtttctctttggggaatcctgggatggctctagccgttccgcagacgggatcgatttcatgattttttttgtttcgttgcatagggtttggtttgcccttttcctttatttcaatatatgccgtgcacttgtttgtcgggtcatcttttcatgcttttttttgtcttggttgtgatgatgtggtctggttgggcggtcgttctagatcggagtagaattctgtttcaaactacctggtggatttattaattttggatctgtatgtgtgtgccatacatattcatagttacgaattgaagatgatggatggaaatatcgatctaggataggtatacatgttgatgcgggttttactgatgcatatacagagatgctttttgttcgcttggttgtgatgatgtggtgtggttgggcggtcgttcattcgttctagatcggagtagaatactgtttcaaactacctggtgtatttattaattttggaactgtatgtgtgtgtcatacatcttcatagttacgagtttaagatggatggaaatatcgatctaggataggtatacatgttgatgtgggttttactgatgcatatacatgatggcatatgcagcatctattcatatgctctaaccttgagtacctatctattataataaacaagtatgttttataattattttgatcttgatatacttggatgatggcatatgcagcagctatatgtggatttttttagccctgccttcatacgctatttatttgcttggtactgtttcttttgtcgatgctcaccctgttgtttggtgttacttctgcaggtcgactttaacttagcctaggatccacacgacaccatgtcccccgagcgccgccccgtcgagatccgcccggccaccgccgccgacatggccgccgtgtgcgacatcgtgaaccactacatcgagacctccaccgtgaacttccgcaccgagccgcagaccccgcaggagtggatcgacgacctggagcgcctccaggaccgctacccgtggctcgtggccgaggtggagggcgtggtggccggcatcgcctacgccggcccgtggaaggcccgcaacgcctacgactggaccgtggagtccaccgtgtacgtgtcccaccgccaccagcgcctcggcctcggctccaccctctacacccacctcctcaagagcatggaggcccagggcttcaagtccgtggtggccgtgatcggcctcccgaacgacccgtccgtgcgcctccacgaggccctcggctacaccgcccgcggcaccctccgcgccgccggctacaagcacggcggctggcacgacgtcggcttctggcagcgcgacttcgagctgccggccccgccgcgcccggtgcgcccggtgacgcagatctgagtcgaaacctagacttgtccatcttctggattggccaacttaattaatgtatgaaataaaaggatgcacacatagtgacatgctaatcactataatgtgggcatcaaagttgtgtgttatgtgtaattactagttatctgaataaaagagaaagagatcatccatatttcttatcctaaatgaatgtcacgtgtctttataattctttgatgaaccagatgcatttcattaaccaaatccatatacatataaatattaatcatatataattaatatcaattgggttagcaaaacaaatctagtctaggtgtgttttgcgaatgcggccgccaccgcggtggagctcgaattcattccgattaatcgtggcctcttgctcttcaggatgaagagctatgtttaaacgtgcaagcgctactagacaattcagtacattaaaaacgtccgcaatgtgttattaagttgtctaagcgtcaatttgtttacaccacaatatatcctgccaccagccagccaacagctccccgaccggcagctcggcacaaaatcaccactcgatacaggcagcccatcagtccgggacggcgtcagcgggagagccgttgtaaggcggcagactttgctcatgttaccgatgctattcggaagaacggcaactaagctgccgggtttgaaacacggatgatctcgcggagggtagcatgttgattgtaacgatgacagagcgttgctgcctgtgatcaaatatcatctccctcgcagagatccgaattatcagccttcttattcatttctcgcttaaccgtgacaggctgtcgatcttgagaactatgccgacataataggaaatcgctggataaagccgctgaggaagctgagtggcgctatttctttagaagtgaacgttgacgatcgtcgaccgtaccccgatgaattaattcggacgtacgttctgaacacagctggatacttacttgggcgattgtcatacatgacatcaacaatgtacccgtttgtgtaaccgtctcttggaggttcgtatgacactagtggttcccctcagcttgcgactagatgttgaggcctaacattttattagagagcaggctagttgcttagatacatgatcttcaggccgttatctgtcagggcaagcgaaaattggccatttatgacgaccaatgccccgcagaagctcccatctttgccgccatagacgccgcgccccccttttggggtgtagaacatccttttgccagatgtggaaaagaagttcgttgtcccattgttggcaatgacgtagtagccggcgaaagtgcgagacccatttgcgctatatataagcctacgatttccgttgcgactattgtcgtaattggatgaactattatcgtagttgctctcagagttgtcgtaatttgatggactattgtcgtaattgcttatggagttgtcgtagttgcttggagaaatgtcgtagttggatggggagtagtcatagggaagacgagcttcatccactaaaacaattggcaggtcagcaagtgcctgccccgatgccatcgcaagtacgaggcttagaaccaccttcaacagatcgcgcatagtcttccccagctctctaacgcttgagttaagccgcgccgcgaagcggcgtcggcttgaacgaattgttagacattatttgccgactaccttggtgatctcgcctttcacgtagtgaacaaattcttccaactgatctgcgcgcgaggccaagcgatcttcttgtccaagataagcctgcctagcttcaagtatgacgggctgatactgggccggcaggcgctccattgcccagtcggcagcgacatccttcggcgcgattttgccggttactgcgctgtaccaaatgcgggacaacgtaagcactacatttcgctcatcgccagcccagtcgggcggcgagttccatagcgttaaggtttcatttagcgcctcaaatagatcctgttcaggaaccggatcaaagagttcctccgccgctggacctaccaaggcaacgctatgttctcttgcttttgtcagcaagatagccagatcaatgtcgatcgtggctggctcgaagatacctgcaagaatgtcattgcgctgccattctccaaattgcagttcgcgcttagctggataacgccacggaatgatgtcgtcgtgcacaacaatggtgacttctacagcgcggagaatctcgctctctccaggggaagccgaagtttccaaaaggtcgttgatcaaagctcgccgcgttgtttcatcaagccttacagtcaccgtaaccagcaaatcaatatcactgtgtggcttcaggccgccatccactgcggagccgtacaaatgtacggccagcaacgtcggttcgagatggcgctcgatgacgccaactacctctgatagttgagtcgatacttcggcgatcaccgcttccctcatgatgtttaactcctgaattaagccgcgccgcgaagcggtgtcggcttgaatgaattgttaggcgtcatcctgtgctcccgagaaccagtaccagtacatcgctgtttcgttcgagacttgaggtctagttttatacgtgaacaggtcaatgccgccgagagtaaagccacattttgcgtacaaattgcaggcaggtacattgttcgtttgtgtctctaatcgtatgccaaggagctgtctgcttagtgcccactttttcgcaaattcgatgagactgtgcgcgactcctttgcctcggtgcgtgtgcgacacaacaatgtgttcgatagaggctagatcgttccatgttgagttgagttcaatcttcccgacaagctcttggtcgatgaatgcgccatagcaagcagagtcttcatcagagtcatcatccgagatgtaatccttccggtaggggctcacacttctggtagatagttcaaagccttggtcggataggtgcacatcgaacacttcacgaacaatgaaatggttctcagcatccaatgtttccgccacctgctcagggatcaccgaaatcttcatatgacgcctaacgcctggcacagcggatcgcaaacctggcgcggcttttggcacaaaaggcgtgacaggtttgcgaatccgttgctgccacttgttaacccttttgccagatttggtaactataatttatgttagaggcgaagtcttgggtaaaaactggcctaaaattgctggggatttcaggaaagtaaacatcaccttccggctcgatgtctattgtagatatatgtagtgtatctacttgatcgggggatctgctgcctcgcgcgtttcggtgatgacggtgaaaacctctgacacatgcagctcccggagacggtcacagcttgtctgtaagcggatgccgggagcagacaagcccgtcagggcgcgtcagcgggtgttggcgggtgtcggggcgcagccatgacccagtcacgtagcgatagcggagtgtatactggcttaactatgcggcatcagagcagattgtactgagagtgcaccatatgcggtgtgaaataccgcacagatgcgtaaggagaaaataccgcatcaggcgctcttccgcttcctcgctcactgactcgctgcgctcggtcgttcggctgcggcgagcggtatcagctcactcaaaggcggtaatacggttatccacagaatcaggggataacgcaggaaagaacatgtgagcaaaaggccagcaaaaggccaggaaccgtaaaaaggccgcgttgctggcgtttttccataggctccgcccccctgacgagcatcacaaaaatcgacgctcaagtcagaggtggcgaaacccgacaggactataaagataccaggcgtttccccctggaagctccctcgtgcgctctcctgttccgaccctgccgcttaccggatacctgtccgcctttctcccttcgggaagcgtggcgctttctcatagctcacgctgtaggtatctcagttcggtgtaggtcgttcgctccaagctgggctgtgtgcacgaaccccccgttcagcccgaccgctgcgccttatccggtaactatcgtcttgagtccaacccggtaagacacgacttatcgccactggcagcagccactggtaacaggattagcagagcgaggtatgtaggcggtgctacagagttcttgaagtggtggcctaactacggctacactagaaggacagtatttggtatctgcgctctgctgaagccagttaccttcggaaaaagagttggtagctcttgatccggcaaacaaaccaccgctggtagcggtggtttttttgtttgcaagcagcagattacgcgcagaaaaaaaggatctcaagaagatcctttgatcttttctacggggtctgacgctcagtggaacgaaaactcacgttaagggattttggtcatgagattatcaaaaaggatcttcacctagatccttttaaattaaaaatgaagttttaaatcaatctaaagtatatatgagtaaacttggtctgacagttaccaatgcttaatcagtgaggcacctatctcagcgatctgtctatttcgttcatccatagttgcctgactccccgtcgtgtagataactacgatacgggagggcttaccatctggccccagtgctgcaatgataccgcgagacccacgctcaccggctccagatttatcagcaataaaccagccagccggaagggccgagcgcagaagtggtcctgcaactttatccgcctccatccagtctattaattgttgccgggaagctagagtaagtagttcgccagttaatagtttgcgcaacgttgttgccattgctgcagggggggggggggggggggacttccattgttcattccacggacaaaaacagagaaaggaaacgacagaggccaaaaagcctcgctttcagcacctgtcgtttcctttcttttcagagggtattttaaataaaaacattaagttatgacgaagaagaacggaaacgccttaaaccggaaaattttcataaatagcgaaaacccgcgaggtcgccgccccgtaacctgtcggatcaccggaaaggacccgtaaagtgataatgattatcatctacatatcacaacgtgcgtggaggccatcaaaccacgtcaaataatcaattatgacgcaggtatcgtattaattgatctgcatcaacttaacgtaaaaacaacttcagacaatacaaatcagcgacactgaatacggggcaacctcatgtcccccccccccccccccctgcaggcatcgtggtgtcacgctcgtcgtttggtatggcttcattcagctccggttcccaacgatcaaggcgagttacatgatcccccatgttgtgcaaaaaagcggttagctccttcggtcctccgatcgttgtcagaagtaagttggccgcagtgttatcactcatggttatggcagcactgcataattctcttactgtcatgccatccgtaagatgcttttctgtgactggtgagtactcaaccaagtcattctgagaatagtgtatgcggcgaccgagttgctcttgcccggcgtcaacacgggataataccgcgccacatagcagaactttaaaagtgctcatcattggaaaacgttcttcggggcgaaaactctcaaggatcttaccgctgttgagatccagttcgatgtaacccactcgtgcacccaactgatcttcagcatcttttactttcaccagcgtttctgggtgagcaaaaacaggaaggcaaaatgccgcaaaaaagggaataagggcgacacggaaatgttgaatactcatactcttcctttttcaatattattgaagcatttatcagggttattgtctcatgagcggatacatatttgaatgtatttagaaaaataaacaaataggggttccgcgcacatttccccgaaaagtgccacctgacgtctaagaaaccattattatcatgacattaacctataaaaataggcgtatcacgaggccctttcgtcttcaagaattcggagcttttgccattctcaccggattcagtcgtcactcatggtgatttctcacttgataaccttatttttgacgaggggaaattaataggttgtattgatgttggacgagtcggaatcgcagaccgataccaggatcttgccatcctatggaactgcctcggtgagttttctccttcattacagaaacggctttttcaaaaatatggtattgataatcctgatatgaataaattgcagtttcatttgatgctcgatgagtttttctaatcagaattggttaattggttgtaacactggcagagcattacgctgacttgacgggacggcggctttgttgaataaatcgaacttttgctgagttgaaggatcagatcacgcatcttcccgacaacgcagaccgttccgtggcaaagcaaaagttcaaaatcaccaactggtccacctacaacaaagctctcatcaaccgtggctccctcactttctggctggatgatggggcgattcaggcctggtatgagtcagcaacaccttcttcacgaggcagacctcagcgccagaaggccgccagagaggccgagcgcggccgtgaggcttggacgctagggcagggcatgaaaaagcccgtagcgggctgctacgggcgtctgacgcggtggaaagggggaggggatgttgtctacatggctctgctgtagtgagtgggttgcgctccggcagcggtcctgatcaatcgtcaccctttctcggtccttcaacgttcctgacaacgagcctccttttcgccaatccatcgacaatcaccgcgagtccctgctcgaacgctgcgtccggaccggcttcgtcgaaggcgtctatcgcggcccgcaacagcggcgagagcggagcctgttcaacggtgccgccgcgctcgccggcatcgctgtcgccggcctgctcctcaagcacggccccaacagtgaagtagctgattgtcatcagcgcattgacggcgtccccggccgaaaaacccgcctcgcagaggaagcgaagctgcgcgtcggccgtttccatctgcggtgcgcccggtcgcgtgccggcatggatgcgcgcgccatcgcggtaggcgagcagcgcctgcctgaagctgcgggcattcccgatcagaaatgagcgccagtcgtcgtcggctctcggcaccgaatgcgtatgattctccgccagcatggcttcggccagtgcgtcgagcagcgcccgcttgttcctgaagtgccagtaaagcgccggctgctgaacccccaaccgttccgccagtttgcgtgtcgtcagaccgtctacgccgacctcgttcaacaggtccagggcggcacggatcactgtattcggctgcaactttgtcatgcttgacactttatcactgataaacataatatgtccaccaacttatcagtgataaagaatccgcgcgttcaatcggaccagcggaggctggtccggaggccagacgtgaaacccaacatacccctgatcgtaattctgagcactgtcgcgctcgacgctgtcggcatcggcctgattatgccggtgctgccgggcctcctgcgcgatctggttcactcgaacgacgtcaccgcccactatggcattctgctggcgctgtatgcgttggtgcaatttgcctgcgcacctgtgctgggcgcgctgtcggatcgtttcgggcggcggccaatcttgctcgtctcgctggccggcgccactgtcgactacgccatcatggcgacagcgcctttcctttgggttctctatatcgggcggatcgtggccggcatcaccggggcgactggggcggtagccggcgcttatattgccgatatcactgatggcgatgagcgcgcgcggcacttcggcttcatgagcgcctgtttcgggttcgggatggtcgcgggacctgtgctcggtgggctgatgggcggtttctccccccacgctccgttcttcgccgcggcagccttgaacggcctcaatttcctgacgggctgtttccttttgccggagtcgcacaaaggcgaacgccggccgttacgccgggaggctctcaacccgctcgcttcgttccggtgggcccggggcatgaccgtcgtcgccgccctgatggcggtcttcttcatcatgcaacttgtcggacaggtgccggccgcgctttgggtcattttcggcgaggatcgctttcactgggacgcgaccacgatcggcatttcgcttgccgcatttggcattctgcattcactcgcccaggcaatgatcaccggccctgtagccgcccggctcggcgaaaggcgggcactcatgctcggaatgattgccgacggcacaggctacatcctgcttgccttcgcgacacggggatggatggcgttcccgatcatggtcctgcttgcttcgggtggcatcggaatgccggcgctgcaagcaatgttgtccaggcaggtggatgaggaacgtcaggggcagctgcaaggctcactggcggcgctcaccagcctgacctcgatcgtcggacccctcctcttcacggcgatctatgcggcttctataacaacgtggaacgggtgggcatggattgcaggcgctgccctctacttgctctgcctgccggcgctgcgtcgcgggctttggagcggcgcagggcaacgagccgatcgctgatcgtggaaacgataggcctatgccatgcgggtcaaggcgacttccggcaagctatacgcgccctaggagtgcggttggaacgttggcccagccagatactcccgatcacgagcaggacgccgatgatttgaagcgcactcagcgtctgatccaagaacaaccatcctagcaacacggcggtccccgggctgagaaagcccagtaaggaaacaactgtaggttcgagtcgcgagatcccccggaaccaaaggaagtaggttaaacccgctccgatcaggccgagccacgccaggccgagaacattggttcctgtaggcatcgggattggcggatcaaacactaaagctactggaacgagcagaagtcctccggccgccagttgccaggcggtaaaggtgagcagaggcacgggaggttgccacttgcgggtcagcacggttccgaacgccatggaaaccgcccccgccaggcccgctgcgacgccgacaggatctagcgctgcgtttggtgtcaacaccaacagcgccacgcccgcagttccgcaaatagcccccaggaccgccatcaatcgtatcgggctacctagcagagcggcagagatgaacacgaccatcagcggctgcacagcgcctaccgtcgccgcgaccccgcccggcaggcggtagaccgaaataaacaacaagctccagaatagcgaaatattaagtgcgccgaggatgaagatgcgcatccaccagattcccgttggaatctgtcggacgatcatcacgagcaataaacccgccggcaacgcccgcagcagcataccggcgacccctcggcctcgctgttcgggctccacgaaaacgccggacagatgcgccttgtgagcgtccttggggccgtcctcctgtttgaagaccgacagcccaatgatctcgccgtcgatgtaggcgccgaatgccacggcatctcgcaaccgttcagcgaacgcctccatgggctttttctcctcgtgctcgtaaacggacccgaacatctctggagctttcttcagggccgacaatcggatctcgcggaaatcctgcacgtcggccgctccaagccgtcgaatctgagccttaatcacaattgtcaattttaatcctctgtttatcggcagttcgtagagcgcgccgtgcgtcccgagcgatactgagcgaagcaagtgcgtcgagcagtgcccgcttgttcctgaaatgccagtaaagcgctggctgctgaacccccagccggaactgaccccacaaggccctagcgtttgcaatgcaccaggtcatcattgacccaggcgtgttccaccaggccgctgcctcgcaactcttcgcaggcttcgccgacctgctcgcgccacttcttcacgcgggtggaatccgatccgcacatgaggcggaaggtttccagcttgagcgggtacggctcccggtgcgagctgaaatagtcgaacatccgtcgggccgtcggcgacagcttgcggtacttctcccatatgaatttcgtgtagtggtcgccagcaaacagcacgacgatttcctcgtcgatcaggacctggcaacgggacgttttcttgccacggtccaggacgcggaagcggtgcagcagcgacaccgattccaggtgcccaacgcggtcggacgtgaagcccatcgccgtcgcctgtaggcgcgacaggcattcctcggccttcgtgtaataccggccattgatcgaccagcccaggtcctggcaaagctcgtagaacgtgaaggtgatcggctcgccgataggggtgcgcttcgcgtactccaacacctgctgccacaccagttcgtcatcgtcggcccgcagctcgacgccggtgtaggtgatcttcacgtccttgttgacgtggaaaatgaccttgttttgcagcgcctcgcgcgggattttcttgttgcgcgtggtgaacagggcagagcgggccgtgtcgtttggcatcgctcgcatcgtgtccggccacggcgcaatatcgaacaaggaaagctgcatttccttgatctgctgcttcgtgtgtttcagcaacgcggcctgcttggcctcgctgacctgttttgccaggtcctcgccggcggtttttcgcttcttggtcgtcatagttcctcgcgtgtcgatggtcatcgacttcgccaaacctgccgcctcctgttcgagacgacgcgaacgctccacggcggccgatggcgcgggcagggcagggggagccagttgcacgctgtcgcgctcgatcttggccgtagcttgctggaccatcgagccgacggactggaaggtttcgcggggcgcacgcatgacggtgcggcttgcgatggtttcggcatcctcggcggaaaaccccgcgtcgatcagttcttgcctgtatgccttccggtcaaacgtccgattcattcaccctccttgcgggattgccccgactcacgccggggcaatgtgcccttattcctgatttgacccgcctggtgccttggtgtccagataatccaccttatcggcaatgaagtcggtcccgtagaccgtctggccgtccttctcgtacttggtattccgaatcttgccctgcacgaataccagcgaccccttgcccaaatacttgccgtgggcctcggcctgagagccaaaacacttgatgcggaagaagtcggtgcgctcctgcttgtcgccggcatcgttgcgccactcttcattaaccgctatatcgaaaattgcttgcggcttgttagaattgccatgacgtacctcggtgtcacgggtaagattaccgataaactggaactgattatggctcatatcgaaagtctccttgagaaaggagactctagtttagctaaacattggttccgctgtcaagaactttagcggctaaaattttgcgggccgcgaccaaaggtgcgaggggcggcttccgctgtgtacaaccagatatttttcaccaacatccttcgtctgctcgatgagcggggcatgacgaaacatgagctgtcggagagggcaggggtttcaatttcgtttttatcagacttaaccaacggtaaggccaacccctcgttgaaggtgatggaggccattgccgacgccctggaaactcccctacctcttctcctggagtccaccgaccttgaccgcgaggcactcgcggagattgcgggtcatcctttcaagagcagcgtgccgcccggatacgaacgcatcagtgtggttttgccgtcacataaggcgtttatcgtaaagaaatggggcgacgacacccgaaaaaagctgcgtggaaggctctgacgccaagggttagggcttgcacttccttctttagccgctaaaacggccccttctctgcgggccgtcggctcgcgcatcatatcgacatcctcaacggaagccgtgccgcgaatggcatcgggcgggtgcgctttgacagttgttttctatcagaacccctacgtcgtgcggttcgattagctgtttgtcttgcaggctaaacactttcggtatatcgtttgcctgtgcgataatgttgctaatgatttgttgcgtaggggttactgaaaagtgagcgggaaagaagagtttcagaccatcaaggagcgggccaagcgcaagctggaacgcgacatgggtgcggacctgttggccgcgctcaacgacccgaaaaccgttgaagtcatgctcaacgcggacggcaaggtgtggcacgaacgccttggcgagccgatgcggtacatctgcgacatgcggcccagccagtcgcaggcgattatagaaacggtggccggattccacggcaaagaggtcacgcggcattcgcccatcctggaaggcgagttccccttggatggcagccgctttgccggccaattgccgccggtcgtggccgcgccaacctttgcgatccgcaagcgcgcggtcgccatcttcacgctggaacagtacgtcgaggcgggcatcatgacccgcgagcaatacgaggtcattaaaagcgccgtcgcggcgcatcgaaacatcctcgtcattggcggtactggctcgggcaagaccacgctcgtcaacgcgatcatcaatgaaatggtcgccttcaacccgtctgagcgcgtcgtcatcatcgaggacaccggcgaaatccagtgcgccgcagagaacgccgtccaataccacaccagcatcgacgtctcgatgacgctgctgctcaagacaacgctgcgtatgcgccccgaccgcatcctggtcggtgaggtacgtggccccgaagcccttgatctgttgatggcctggaacaccgggcatgaaggaggtgccgccaccctgcacgcaaacaaccccaaagcgggcctgagccggctcgccatgcttatcagcatgcacccggattcaccgaaacccattgagccgctgattggcgaggcggttcatgtggtcgtccatatcgccaggacccctagcggccgtcgagtgcaagaaattctcgaagttcttggttacgagaacggccagtacatcaccaaaaccctgtaaggagtatttccaatgacaacggctgttccgttccgtctgaccatgaatcgcggcattttgttctaccttgccgtgttcttcgttctcgctctcgcgttatccgcgcatccggcgatggcctcggaaggcaccggcggcagcttgccatatgagagctggctgacgaacctgcgcaactccgtaaccggcccggtggccttcgcgctgtccatcatcggcatcgtcgtcgccggcggcgtgctgatcttcggcggcgaactcaacgccttcttccgaaccctgatcttcctggttctggtgatggcgctgctggtcggcgcgcagaacgtgatgagcaccttcttcggtcgtggtgccgaaatcgcggccctcggcaacggggcgctgcaccaggtgcaagtcgcggcggcggatgccgtgcgtgcggtagcggctggacggctcgcctaatcatggctctgcgcacgatccccatccgtcgcgcaggcaaccgagaaaacctgttcatgggtggtgatcgtgaactggtgatgttctcgggcctgatggcgtttgcgctgattttcagcgcccaagagctgcgggccaccgtggtcggtctgatcctgtggttcggggcgctctatgcgttccgaatcatggcgaaggccgatccgaagatgcggttcgtgtacctgcgtcaccgccggtacaagccgtattacccggcccgctcgaccccgttccgcgagaacaccaatagccaagggaagcaataccgatgatccaagcaattgcgattgcaatcgcgggcctcggcgcgcttctgttgttcatcctctttgcccgcatccgcgcggtcgatgccgaactgaaactgaaaaagcatcgttccaaggacgccggcctggccgatctgctcaactacgccgctgtcgtcgatgacggcgtaatcgtgggcaagaacggcagctttatggctgcctggctgtacaagggcgatgacaacgcaagcagcaccgaccagcagcgcgaagtagtgtccgcccgcatcaaccaggccctcgcgggcctgggaagtgggtggatgatccatgtggacgccgtgcggcgtcctgctccgaactacgcggagcggggcctgtcggcgttccctgaccgtctgacggcagcgattgaagaagagcgctcggtcttgccttgctcgtcggtgatgtacttcaccagctccgcgaagtcgctcttcttgatggagcgcatggggacgtgcttggcaatcacgcgcaccccccggccgttttagcggctaaaaaagtcatggctctgccctcgggcggaccacgcccatcatgaccttgccaagctcgtcctgcttctcttcgatcttcgccagcagggcgaggatcgtggcatcaccgaaccgcgccgtgcgcgggtcgtcggtgagccagagtttcagcaggccgcccaggcggcccaggtcgccattgatgcgggccagctcgcggacgtgctcatagtccacgacgcccgtgattttgtagccctggccgacggccagcaggtaggccgacaggctcatgccggccgccgccgccttttcctcaatcgctcttcgttcgtctggaaggcagtacaccttgataggtgggctgcccttcctggttggcttggtttcatcagccatccgcttgccctcatctgttacgccggcggtagccggccagcctcgcagagcaggattcccgttgagcaccgccaggtgcgaataagggacagtgaagaaggaacacccgctcgcgggtgggcctacttcacctatcctgcccggctgacgccgttggatacaccaaggaaagtctacacgaaccctttggcaaaatcctgtatatcgtgcgaaaaaggatggatataccgaaaaaatcgctataatgaccccgaagcagggttatgcagcggaaaagcgctgcttccctgctgttttgtggaatatctaccgactggaaacaggcaaatgcaggaaattactgaactgaggggacaggcgagagacgatgccaaagagctacaccgacgagctggccgagtgggttgaatcccgcgcggccaagaagcgccggcgtgatgaggctgcggttgcgttcctggcggtgagggcggatgtcgaggcggcgttagcgtccggctatgcgctcgtcaccatttgggagcacatgcgggaaacggggaaggtcaagttctcctacgagacgttccgctcgcacgccaggcggcacatcaaggccaagcccgccgatgtgcccgcaccgcaggccaaggctgcggaacccgcgccggcacccaagacgccggagccacggcggccgaagcaggggggcaaggctgaaaagccggcccccgctgcggccccgaccggcttcaccttcaacccaacaccggacaaaaaggatctactgtaatggcgaaaattcacatggttttgcagggcaagggcggggtcggcaagtcggccatcgccgcgatcattgcgcagtacaagatggacaaggggcagacacccttgtgcatcgacaccgacccggtgaacgcgacgttcgagggctacaaggccctgaacgtccgccggctgaacatcatggccggcgacgaaattaactcgcgcaacttcgacaccctggtcgagctgattgcgccgaccaaggatgacgtggtgatcgacaacggtgccagctcgttcgtgcctctgtcgcattacctcatcagcaaccaggtgccggctctgctgcaagaaatggggcatgagctggtcatccataccgtcgtcaccggcggccaggctctcctggacacggtgagcggcttcgcccagctcgccagccagttcccggccgaagcgcttttcgtggtctggctgaacccgtattgggggcctatcgagcatgagggcaagagctttgagcagatgaaggcgtacacggccaacaaggcccgcgtgtcgtccatcatccagattccggccctcaaggaagaaacctacggccgcgatttcagcgacatgctgcaagagcggctgacgttcgaccaggcgctggccgatgaatcgctcacgatcatgacgcggcaacgcctcaagatcgtgcggcgcggcctgtttgaacagctcgacgcggcggccgtgctatgagcgaccagattgaagagctgatccgggagattgcggccaagcacggcatcgccgtcggccgcgacgacccggtgctgatcctgcataccatcaacgcccggctcatggccgacagtgcggccaagcaagaggaaatccttgccgcgttcaaggaagagctggaagggatcgcccatcgttggggcgaggacgccaaggccaaagcggagcggatgctgaacgcggccctggcggccagcaaggacgcaatggcgaaggtaatgaaggacagcgccgcgcaggcggccgaagcgatccgcagggaaatcgacgacggccttggccgccagctcgcggccaaggtcgcggacgcgcggcgcgtggcgatgatgaacatgatcgccggcggcatggtgttgttcgcggccgccctggtggtgtgggcctcgttatgaatcgcagaggcgcagatgaaaaagcccggcgttgccgggctttgtttttgcgttagctgggcttgtttgacaggcccaagctctgactgcgcccgcgctcgcgctcctgggcctgtttcttctcctgctcctgcttgcgcatcagggcctggtgccgtcgggctgcttcacgcatcgaatcccagtcgccggccagctcgggatgctccgcgcgcatcttgcgcgtcgccagttcctcgatcttgggcgcgtgaatgcccatgccttccttgatttcgcgcaccatgtccagccgcgtgtgcagggtctgcaagcgggcttgctgttgggcctgctgctgctgccaggcggcctttgtacgcggcagggacagcaagccgggggcattggactgtagctgctgcaaacgcgcctgctgacggtctacgagctgttctaggcggtcctcgatgcgctccacctggtcatgctttgcctgcacgtagagcgcaagggtctgctggtaggtctgctcgatgggcgcggattctaagagggcctgctgttccgtctcggcctcctgggccgcctgtagcaaatcctcgccgctgttgccgctggactgctttactgccggggactgctgttgccctgctcgcgccgtcgtcgcagttcggcttgcccccactcgattgactgcttcatttcgagccgcagcgatgcgatctcggattgcgtcaacggacggggcagcgcggaggtgtccggcttctccttgggtgagtcggtcgatgccatagccaaaggtttccttccaaaatgcgtccattgctggaccgtgtttctcattgatgcccgcaagcatcttcggcttgaccgccaggtcaagcgcgccttcatgggcggtcatgacggacgccgccatgaccttgccgccgttgttctcgatgtagccgcgtaatgaggcaatggtgccgcccatcgtcagcgtgtcatcgacaacgatgtacttctggccggggatcacctccccctcgaaagtcgggttgaacgccaggcgatgatctgaaccggctccggttcgggcgaccttctcccgctgcacaatgtccgtttcgacctcaaggccaaggcggtcggccagaacgaccgccatcatggccggaatcttgttgttccccgccgcctcgacggcgaggactggaacgatgcggggcttgtcgtcgccgatcagcgtcttgagctgggcaacagtgtcgtccgaaatcaggcgctcgaccaaattaagcgccgcttccgcgtcgccctgcttcgcagcctggtattcaggctcgttggtcaaagaaccaaggtcgccgttgcgaaccaccttcgggaagtctccccacggtgcgcgctcggctctgctgtagctgctcaagacgcctccctttttagccgctaaaactctaacgagtgcgcccgcgactcaacttgacgctttcggcacttacctgtgccttgccacttgcgtcataggtgatgcttttcgcactcccgatttcaggtactttatcgaaatctgaccgggcgtgcattacaaagttcttccccacctgttggtaaatgctgccgctatctgcgtggacgatgctgccgtcgtggcgctgcgacttatcggccttttgggccatatagatgttgtaaatgccaggtttcagggccccggctttatctaccttctggttcgtccatgcgccttggttctcggtctggacaattctttgcccattcatgaccaggaggcggtgtttcattgggtgactcctgacggttgcctctggtgttaaacgtgtcctggtcgcttgccggctaaaaaaaagccgacctcggcagttcgaggccggctttccctagagccgggcgcgtcaaggttgttccatctattttagtgaactgcgttcgatttatcagttactttcctcccgctttgtgtttcctcccactcgtttccgcgtctagccgacccctcaacatagcggcctcttcttgggctgcctttgcctcttgccgcgcttcgtcacgctcggcttgcaccgtcgtaaagcgctcggcctgcctggccgcctcttgcgccgccaacttcctttgctcctggtgggcctcggcgtcggcctgcgccttcgctttcaccgctgccaactccgtgcgcaaactctccgcttcgcgcctggtggcgtcgcgctcgccgcgaagcgcctgcatttcctggttggccgcgtccagggtcttgcggctctcttctttgaatgcgcgggcgtcctggtgagcgtagtccagctcggcgcgcagctcctgcgctcgacgctccacctcgtcggcccgctgcgtcgccagcgcggcccgctgctcggctcctgccagggcggtgcgtgcttcggccagggcttgccgctggcgtgcggccagctcggccgcctcggcggcctgctgctctagcaatgtaacgcgcgcctgggcttcttccagctcgcgggcctgcgcctcgaaggcgtcggccagctccccgcgcacggcttccaactcgttgcgctcacgatcccagccggcttgcgctgcctgcaacgattcattggcaagggcctgggcggcttgccagagggcggccacggcctggttgccggcctgctgcaccgcgtccggcacctggactgccagcggggcggcctgcgccgtgcgctggcgtcgccattcgcgcatgccggcgctggcgtcgttcatgttgacgcgggcggccttacgcactgcatccacggtcgggaagttctcccggtcgccttgctcgaacagctcgtccgcagccgcaaaaatgcggtcgcgcgtctctttgttcagttccatgttggctccggtaattggtaagaataataatactcttacctaccttatcagcgcaagagtttagctgaacagttctcgacttaacggcaggttttttagcggctgaagggcaggcaaaaaaagccccgcacggtcggcgggggcaaagggtcagcgggaaggggattagcgggcgtcgggcttcttcatgcgtcggggccgcgcttcttgggatggagcacgacgaagcgcgcacgcgcatcgtcctcggccctatcggcccgcgtcgcggtcaggaacttgtcgcgcgctaggtcctccctggtgggcaccaggggcatgaactcggcctgctcgatgtaggtccactccatgaccgcatcgcagtcgaggccgcgttccttcaccgtctcttgcaggtcgcggtacgcccgctcgttgagcggctggtaacgggccaattggtcgtaaatggctgtcggccatgagcggcctttcctgttgagccagcagccgacgacgaagccggcaatgcaggcccctggcacaaccaggccgacgccgggggcaggggatggcagcagctcgccaaccaggaaccccgccgcgatgatgccgatgccggtcaaccagcccttgaaactatccggccccgaaacacccctgcgcattgcctggatgctgcgccggatagcttgcaacatcaggagccgtttcttttgttcgtcagtcatggtccgccctcaccagttgttcgtatcggtgtcggacgaactgaaatcgcaagagctgccggtatcggtccagccgctgtccgtgtcgctgctgccgaagcacggcgaggggtccgcgaacgccgcagacggcgtatccggccgcagcgcatcgcccagcatggccccggtcagcgagccgccggccaggtagcccagcatggtgctgttggtcgccccggccaccagggccgacgtgacgaaatcgccgtcattccctctggattgttcgctgctcggcggggcagtgcgccgcgccggcggcgtcgtggatggctcgggttggctggcctgcgacggccggcgaaaggtgcgcagcagctcgttatcgaccggctgcggcgtcggggccgccgccttgcgctgcggtcggtgttccttcttcggctcgcgcagcttgaacagcatgatcgcggaaaccagcagcaacgccgcgcctacgcctcccgcgatgtagaacagcatcggattcattcttcggtcctccttgtagcggaaccgttgtctgtgcggcgcgggtggcccgcgccgctgtctttggggatcagccctcgatgagcgcgaccagtttcacgtcggcaaggttcgcctcgaactcctggccgtcgtcctcgtacttcaaccaggcatagccttccgccggcggccgacggttgaggataaggcgggcagggcgctcgtcgtgctcgacctggacgatggcctttttcagcttgtccgggtccggctccttcgcgcccttttccttggcgtccttaccgtcctggtcgccgtcctcgccgtcctggccgtcgccggcctccgcgtcacgctcggcatcagtctggccgttgaaggcatcgacggtgttgggatcgcggcccttctcgtccaggaactcgcgcagcagcttgaccgtgccgcgcgtgatttcctgggtgtcgtcgtcaagccacgcctcgacttcctccgggcgcttcttgaaggccgtcaccagctcgttcaccacggtcacgtcgcgcacgcggccggtgttgaacgcatcggcgatcttctccggcaggtccagcagcgtgacgtgctgggtgatgaacgccggcgacttgccgatttccttggcgatatcgcctttcttcttgcccttcgccagctcgcggccaatgaagtcggcaatttcgcgcggggtcagctcgttgcgttgcaggttctcgataacctggtcggcttcgttgtagtcgttgtcgatgaacgccgggatggacttcttgccggcccacttcgagccacggtagcggcgggcgccgtgattgatgatatagcggcccggctgctcctggttctcgcgcaccgaaatgggtgacttcaccccgcgctctttgatcgtggcaccgatttccgcgatgctctccggggaaaagccggggttgtcggccgtccgcggctgatgcggatcttcgtcgatcaggtccaggtccagctcgatagggccggaaccgccctgagacgccgcaggagcgtccaggaggctcgacaggtcgccgatgctatccaaccccaggccggacggctgcgccgcgcctgcggcttcctgagcggccgcagcggtgtttttcttggtggtcttggcttgagccgcagtcattgggaaatctccatcttcgtgaacacgtaatcagccagggcgcgaacctctttcgatgccttgcgcgcggccgttttcttgatcttccagaccggcacaccggatgcgagggcatcggcgatgctgctgcgcaggccaacggtggccggaatcatcatcttggggtacgcggccagcagctcggcttggtggcgcgcgtggcgcggattccgcgcatcgaccttgctgggcaccatgccaaggaattgcagcttggcgttcttctggcgcacgttcgcaatggtcgtgaccatcttcttgatgccctggatgctgtacgcctcaagctcgatgggggacagcacatagtcggccgcgaagagggcggccgccaggccgacgccaagggtcggggccgtgtcgatcaggcacacgtcgaagccttggttcgccagggccttgatgttcgccccgaacagctcgcgggcgtcgtccagcgacagccgttcggcgttcgccagtaccgggttggactcgatgagggcgaggcgcgcggcctggccgtcgccggctgcgggtgcggtttcggtccagccgccggcagggacagcgccgaacagcttgcttgcatgcaggccggtagcaaagtccttgagcgtgtaggacgcattgccctgggggtccaggtcgatcacggcaacccgcaagccgcgctcgaaaaagtcgaaggcaagatgcacaagggtcgaagtcttgccgacgccgcctttctggttggccgtgaccaaagttttcatcgtttggtttcctgttttttcttggcgtccgcttcccacttccggacgatgtacgcctgatgttccggcagaaccgccgttacccgcgcgtacccctcgggcaagttcttgtcctcgaacgcggcccacacgcgatgcaccgcttgcgacactgcgcccctggtcagtcccagcgacgttgcgaacgtcgcctgtggcttcccatcgactaagacgccccgcgctatctcgatggtctgctgccccacttccagcccctggatcgcctcctggaactggctttcggtaagccgtttcttcatggataacacccataatttgctccgcgccttggttgaacatagcggtgacagccgccagcacatgagagaagtttagctaaacatttctcgcacgtcaacacctttagccgctaaaactcgtccttggcgtaacaaaacaaaagcccggaaaccgggctttcgtctcttgccgcttatggctctgcacccggctccatcaccaacaggtcgcgcacgcgcttcactcggttgcggatcgacactgccagcccaacaaagccggttgccgccgccgccaggatcgcgccgatgatgccggccacaccggccatcgcccaccaggtcgccgccttccggttccattcctgctggtactgcttcgcaatgctggacctcggctcaccataggctgaccgctcgatggcgtatgccgcttctccccttggcgtaaaacccagcgccgcaggcggcattgccatgctgcccgccgctttcccgaccacgacgcgcgcaccaggcttgcggtccagaccttcggccacggcgagctgcgcaaggacataatcagccgccgacttggctccacgcgcctcgatcagctcttgcactcgcgcgaaatccttggcctccacggccgccatgaatcgcgcacgcggcgaaggctccgcagggccggcgtcgtgatcgccgccgagaatgcccttcaccaagttcgacgacacgaaaatcatgctgacggctatcaccatcatgcagacggatcgcacgaacccgctgaattgaacacgagcacggcacccgcgaccactatgccaagaatgcccaaggtaaaaattgccggccccgccatgaagtccgtgaatgccccgacggccgaagtgaagggcaggccgccacccaggccgccgccctcactgcccggcacctggtcgctgaatgtcgatgccagcacctgcggcacgtcaatgcttccgggcgtcgcgctcgggctgatcgcccatcccgttactgccccgatcccggcaatggcaaggactgccagcgctgccatttttggggtgaggccgttcgcggccgaggggcgcagcccctggggggatgggaggcccgcgttagcgggccgggagggttcgagaagggggggcaccccccttcggcgtgcgcggtcacgcgcacagggcgcagccctggttaaaaacaaggtttataaatattggtttaaaagcaggttaaaagacaggttagcggtggccgaaaaacgggcggaaacccttgcaaatgctggattttctgcctgtggacagcccctcaaatgtcaataggtgcgcccctcatctgtcagcactctgcccctcaagtgtcaaggatcgcgcccctcatctgtcagtagtcgcgcccctcaagtgtcaataccgcagggcacttatccccaggcttgtccacatcatctgtgggaaactcgcgtaaaatcaggcgttttcgccgatttgcgaggctggccagctccacgtcgccggccgaaatcgagcctgcccctcatctgtcaacgccgcgccgggtgagtcggcccctcaagtgtcaacgtccgcccctcatctgtcagtgagggccaagttttccgcgaggtatccacaacgccggcggccgcggtgtctcgcacacggcttcgacggcgtttctggcgcgtttgcagggccatagacggccgccagcccagcggcgagggcaaccagcccggtgagcgtcggaaaggcgctggaagccccgtagcgacgcggagaggggcgagacaagccaagggcgcaggctcgatgcgcagcacgacatagccggttctcgcaaggacgagaatttccctgcggtgcccctcaagtgtcaatgaaagtttccaacgcgagccattcgcgagagccttgagtccacgctagatgagagctttgttgtaggtggaccagttggtgattttgaacttttgctttgccacggaacggtctgcgttgtcgggaagatgcgtgatctgatccttcaactcagcaaaagttcgatttattcaacaaagccacgttgtgtctcaaaatctctgatgttacattgcacaagataaaaatatatcatcatgaacaataaaactgtctgcttacataaacagtaatacaaggggtgttatgagccatattcaacgggaaacgtcttgctcgactctagagctcgttcctcgaggcctcgaggcctcgaggaacggtacctgcggggaagcttacaataatgtgtgttgttaagtcttgttgcctgtcatcgtctgactgactttcgtcataaatcccggcctccgtaacccagctttgggcaagctcacggatttgatccggcggaacgggaatatcgagatgccgggctgaacgctgcagttccagctttccctttcgggacaggtactccagctgattgattatctgctgaagggtcttggttccacctcctggcacaatgcgaatgattacttgagcgcgatcgggcatccaattttctcccgtcaggtgcgtggtcaagtgctacaaggcacctttcagtaacgagcgaccgtcgatccgtcgccgggatacggacaaaatggagcgcagtagtccatcgagggcggcgaaagcctcgccaaaagcaatacgttcatctcgcacagcctccagatccgatcgagggtcttcggcgtaggcagatagaagcatggatacattgcttgagagtattccgatggactgaagtatggcttccatcttttctcgtgtgtctgcatctatttcgagaaagcccccgatgcggcgcaccgcaacgcgaattgccatactatccgaaagtcccagcaggcgcgcttgataggaaaaggtttcatactcggccgatcgcagacgggcactcacgaccttgaacccttcaactttcagggatcgatgctggttgatggtagtctcactcgacgtggctctggtgtgttttgacatagcttcctccaaagaaagcggaaggtctggatactccagcacgaaatgtgcccgggtagacggatggaagtctagccctgctcaatatgaaatcaacagtacatttacagtcaatactgaatatacttgctacatttgcaattgtcttataacgaatgtgaaataaaaatagtgtaacaacgcttttactcatcgataatcacaaaaacatttatacgaacaaaaatacaaatgcactccggtttcacaggataggcgggatcagaatatgcaacttttgacgttttgttctttcaaagggggtgctggcaaaaccaccgcactcatgggcctttgcgctgctttggcaaatgacggtaaacgagtggccctctttgatgccgacgaaaaccggcctctgacgcgatggagagaaaacgccttacaaagcagtactgggatcctcgctgtgaagtctattccgccgacgaaatgccccttcttgaagcagcctatgaaaatgccgagctcgaaggatttgattatgcgttggccgatacgcgtggcggctcgagcgagctcaacaacacaatcatcgctagctcaaacctgcttctgatccccaccatgctaacgccgctcgacatcgatgaggcactatctacctaccgctacgtcatcgagctgctgttgagtgaaaatttggcaattcctacagctgttttgcgccaacgcgtcccggtcggccgattgacaacatcgcaacgcaggatgtcagagacgctagagagccttccagttgtaccgtctcccatgcatgaaagagatgcatttgccgcgatgaaagaacgcggcatgttgcatcttacattactaaacacgggaactgatccgacgatgcgcctcatagagaggaatcttcggattgcgatggaggaagtcgtggtcatttcgaaactgatcagcaaaatcttggaggcttgaagatggcaattcgcaagcccgcattgtcggtcggcgaagcacggcggcttgctggtgctcgacccgagatccaccatcccaacccgacacttgttccccagaagctggacctccagcacttgcctgaaaaagccgacgagaaagaccagcaacgtgagcctctcgtcgccgatcacatttacagtcccgatcgacaacttaagctaactgtggatgcccttagtccacctccgtccccgaaaaagctccaggtttttctttcagcgcgaccgcccgcgcctcaagtgtcgaaaacatatgacaacctcgttcggcaatacagtccctcgaagtcgctacaaatgattttaaggcgcgcgttggacgatttcgaaagcatgctggcagatggatcatttcgcgtggccccgaaaagttatccgatcccttcaactacagaaaaatccgttctcgttcagacctcacgcatgttcccggttgcgttgctcgaggtcgctcgaagtcattttgatccgttggggttggagaccgctcgagctttcggccacaagctggctaccgccgcgctcgcgtcattctttgctggagagaagccatcgagcaattggtgaagagggacctatcggaacccctcaccaaatattgagtgtaggtttgaggccgctggccgcgtcctcagtcaccttttgagccagataattaagagccaaatgcaattggctcaggctgccatcgtccccccgtgcgaaacctgcacgtccgcgtcaaagaaataaccggcacctcttgctgtttttatcagttgagggcttgacggatccgcctcaagtttgcggcgcagccgcaaaatgagaacatctatactcctgtcgtaaacctcctcgtcgcgtactcgactggcaatgagaagttgctcgcgcgatagaacgtcgcggggtttctctaaaaacgcgaggagaagattgaactcacctgccgtaagtttcacctcaccgccagcttcggacatcaagcgacgttgcctgagattaagtgtccagtcagtaaaacaaaaagaccgtcggtctttggagcggacaacgttggggcgcacgcgcaaggcaacccgaatgcgtgcaagaaactctctcgtactaaacggcttagcgataaaatcacttgctcctagctcgagtgcaacaactttatccgtctcctcaaggcggtcgccactgataattatgattggaatatcagactttgccgccagatttcgaacgatctcaagcccatcttcacgacctaaatttagatcaacaaccacgacatcgaccgtcgcggaagagagtactctagtgaactgggtgctgtcggctaccgcggtcactttgaaggcgtggatcgtaaggtattcgataataagatgccgcatagcgacatcgtcatcgataagaagaacgtgtttcaacggctcacctttcaatctaaaatctgaacccttgttcacagcgcttgagaaattttcacgtgaaggatgtacaatcatctccagctaaatgggcagttcgtcagaattgcggctgaccgcggatgacgaaaatgcgaaccaagtatttcaattttatgacaaaagttctcaatcgttgttacaagtgaaacgcttcgaggttacagctactattgattaaggagatcgcctatggtctcgccccggcgtcgtgcgtccgccgcgagccagatctcgcctacttcataaacgtcctcataggcacggaatggaatgatgacatcgatcgccgtagagagcatgtcaatcagtgtgcgatcttccaagctagcaccttgggcgctacttttgacaagggaaaacagtttcttgaatccttggattggattcgcgccgtgtattgttgaaatcgatcccggatgtcccgagacgacttcactcagataagcccatgctgcatcgtcgcgcatctcgccaagcaatatccggtccggccgcatacgcagacttgcttggagcaagtgctcggcgctcacagcacccagcccagcaccgttcttggagtagagtagtctaacatgattatcgtgtggaatgacgagttcgagcgtatcttctatggtgattagcctttcctggggggggatggcgctgatcaaggtcttgctcattgttgtcttgccgcttccggtagggccacatagcaacatcgtcagtcggctgacgacgcatgcgtgcagaaacgcttccaaatccccgttgtcaaaatgctgaaggatagcttcatcatcctgattttggcgtttccttcgtgtctgccactggttccacctcgaagcatcataacgggaggagacttctttaagaccagaaacacgcgagcttggccgtcgaatggtcaagctgacggtgcccgagggaacggtcggcggcagacagatttgtagtcgttcaccaccaggaagttcagtggcgcagagggggttacgtggtccgacatcctgctttctcagcgcgcccgctaaaatagcgatatcttcaagatcatcataagagacgggcaaaggcatcttggtaaaaatgccggcttggcgcacaaatgcctctccaggtcgattgatcgcaatttcttcagtcttcgggtcatcgagccattccaaaatcggcttcagaagaaagcgtagttgcggatccacttccatttacaatgtatcctatctctaagcggaaatttgaattcattaagagcggcggttcctcccccgcgtggcgccgccagtcaggcggagctggtaaacaccaaagaaatcgaggtcccgtgctacgaaaatggaaacggtgtcaccctgattcttcttcagggttggcggtatgttgatggttgccttaagggctgtctcagttgtctgctcaccgttattttgaaagctgttgaagctcatcccgccacccgagctgccggcgtaggtgctagctgcctggaaggcgccttgaacaacactcaagagcatagctccgctaaaacgctgccagaagtggctgtcgaccgagcccggcaatcctgagcgaccgagttcgtccgcgcttggcgatgttaacgagatcatcgcatggtcaggtgtctcggcgcgatcccacaacacaaaaacgcgcccatctccctgttgcaagccacgctgtatttcgccaacaacggtggtgccacgatcaagaagcacgatattgttcgttgttccacgaatatcctgaggcaagacacactttacatagcctgccaaatttgtgtcgattgcggtttgcaagatgcacggaattattgtcccttgcgttaccataaaatcggggtgcggcaagagcgtggcgctgctgggctgcagctcggtgggtttcatacgtatcgacaaatcgttctcgccggacacttcgccattcggcaaggagttgtcgtcacgcttgccttcttgtcttcggcccgtgtcgccctgaatggcgcgtttgctgaccccttgatcgccgctgctatatgcaaaaatcggtgtttcttccggccgtggctcatgccgctccggttcgcccctcggcggtagaggagcagcaggctgaacagcctcttgaaccgctggaggatccggcggcacctcaatcggagctggatgaaatggcttggtgtttgttgcgatcaaagttgacggcgatgcgttctcattcaccttcttttggcgcccacctagccaaatgaggcttaatgataacgcgagaacgacacctccgacgatcaatttctgagaccccgaaagacgccggcgatgtttgtcggagaccagggatccagatgcatcaacctcatgtgccgcttgctgactatcgttattcatcccttcgcccccttcaggacgcgtttcacatcgggcctcaccgtgcccgtttgcggcctttggccaacgggatcgtaagcggtgttccagatacatagtactgtgtggccatccctcagacgccaacctcgggaaaccgaagaaatctcgacatcgctccctttaactgaatagttggcaacagcttccttgccatcaggattgatggtgtagatggagggtatgcgtacattgcccggaaagtggaataccgtcgtaaatccattgtcgaagacttcgagtggcaacagcgaacgatcgccttgggcgacgtagtgccaattactgtccgccgcaccaagggctgtgacaggctgatccaataaattctcagctttccgttgatattgtgcttccgcgtgtagtctgtccacaacagccttctgttgtgcctcccttcgccgagccgccgcatcgtcggcggggtaggcgaattggacgctgtaatagagatcgggctgctctttatcgaggtgggacagagtcttggaacttatactgaaaacataacggcgcatcccggagtcgcttgcggttagcacgattactggctgaggcgtgaggacctggcttgccttgaaaaatagataatttccccgcggtagggctgctagatctttgctatttgaaacggcaaccgctgtcaccgtttcgttcgtggcgaatgttacgaccaaagtagctccaaccgccgtcgagaggcgcaccacttgatcgggattgtaagccaaataacgcatgcgcggatctagcttgcccgccattggagtgtcttcagcctccgcaccagtcgcagcggcaaataaacatgctaaaatgaaaagtgcttttctgatcatggttcgctgtggcctacgtttgaaacggtatcttccgatgtctgataggaggtgacaaccagacctgccgggttggttagtctcaatctgccgggcaagctggtcaccttttcgtagcgaactgtcgcggtccacgtactcaccacaggcattttgccgtcaacgacgagggtccttttatagcgaatttgctgcgtgcttggagttacatcatttgaagcgatgtgctcgacctccaccctgccgcgtttgccaagaatgacttgaggcgaactgggattgggatagttgaagaattgctggtaatcctggcgcactgttggggcactgaagttcgataccaggtcgtaggcgtactgagcggtgtcggcatcataactctcgcgcaggcgaacgtactcccacaatgaggcgttaacgacggcctcctcttgagttgcaggcaatcgcgagacagacacctcgctgtcaacggtgccgtccggccgtatccatagatatacgggcacaagcctgctcaacggcaccattgtggctatagcgaacgcttgagcaacatttcccaaaatcgcgatagctgcgacagctgcaatgagtttggagagacgtcgcgccgatttcgctcgcgcggtttgaaaggcttctacttccttatagtgctcggcaaggctttcgcgcgccactagcatggcatattcaggccccgtcatagcgtccacccgaattgccgagctgaagatctgacggagtaggctgccatcgccccacattcagcgggaagatcgggcctttgcagctcgctaatgtgtcgtttgtctggcagccgctcaaagcgacaactaggcacagcaggcaatacttcatagaattctccattgaggcgaatttttgcgcgacctagcctcgctcaacctgagcgaagcgacggtacaagctgctggcagattgggttgcgccgctccagtaactgcctccaatgttgccggcgatcgccggcaaagcgacaatgagcgcatcccctgtcagaaaaaacatatcgagttcgtaaagaccaatgatcttggccgcggtcgtaccggcgaaggtgattacaccaagcataagggtgagcgcagtcgcttcggttaggatgacgatcgttgccacgaggtttaagaggagaagcaagagaccgtaggtgataagttgcccgatccacttagctgcgatgtcccgcgtgcgatcaaaaatatatccgacgaggatcagaggcccgatcgcgagaagcactttcgtgagaattccaacggcgtcgtaaactccgaaggcagaccagagcgtgccgtaaaggacccactgtgccccttggaaagcaaggatgtcctggtcgttcatcggaccgatttcggatgcgattttctgaaaaacggcctgggtcacggcgaacattgtatccaactgtgccggaacagtctgcagaggcaagccggttacactaaactgctgaacaaagtttgggaccgtcttttcgaagatggaaaccacatagtcttggtagttagcctgcccaacaattagagcaacaacgatggtgaccgtgatcacccgagtgataccgctacgggtatcgacttcgccgcgtatgactaaaataccctgaacaataatccaaagagtgacacaggcgatcaatggcgcactcaccgcctcctggatagtctcaagcatcgagtccaagcctgtcgtgaaggctacatcgaagatcgtatgaatggccgtaaacggcgccggaatcgtgaaattcatcgattggacctgaacttgactggtttgtcgcataatgttggataaaatgagctcgcattcggcgaggatgcgggcggatgaacaaatcgcccagccttaggggagggcaccaaagatgacagcggtcttttgatgctccttgcgttgagcggccgcctcttccgcctcgtgaaggccggcctgcgcggtagtcatcgttaataggcttgtcgcctgtacattttgaatcattgcgtcatggatctgcttgagaagcaaaccattggtcacggttgcctgcatgatattgcgagatcgggaaagctgagcagacgtatcagcattcgccgtcaagcgtttgtccatcgtttccagattgtcagccgcaatgccagcgctgtttgcggaaccggtgatctgcgatcgcaacaggtccgcttcagcatcactacccacgactgcacgatctgtatcgctggtgatcgcacgtgccgtggtcgacattggcattcgcggcgaaaacatttcattgtctaggtccttcgtcgaaggatactgatttttctggttgagcgaagtcagtagtccagtaacgccgtaggccgacgtcaacatcgtaaccatcgctatagtctgagtgagattctccgcagtcgcgagcgcagtcgcgagcgtctcagcctccgttgccgggtcgctaacaacaaactgcgcccgcgcgggctgaatatatagaaagctgcaggtcaaaactgttgcaataagttgcgtcgtcttcatcgtttcctaccttatcaatcttctgcctcgtggtgacgggccatgaattcgctgagccagccagatgagttgccttcttgtgcctcgcgtagtcgagttgcaaagcgcaccgtgttggcacgccccgaaagcacggcgacatattcacgcatatcccgcagatcaaattcgcagatgacgcttccactttctcgtttaagaagaaacttacggctgccgaccgtcatgtcttcacggatcgcctgaaattccttttcggtacatttcagtccatcgacataagccgatcgatctgcggttggtgatggatagaaaatcttcgtcatacattgcgcaaccaagctggctcctagcggcgattccagaacatgctctggttgctgcgttgccagtattagcatcccgttgttttttcgaacggtcaggaggaatttgtcgacgacagtcgaaaatttagggtttaacaaataggcgcgaaactcatcgcagctcatcacaaaacggcggccgtcgatcatggctccaatccgatgcaggagatatgctgcagcgggagcgcatacttcctcgtattcgagaagatgcgtcatgtcgaagccggtaatcgacggatctaactttacttcgtcaacttcgccgtcaaatgcccagccaagcgcatggccccggcaccagcgttggagccgcgctcctgcgccttcggcgggcccatgcaacaaaaattcacgtaaccccgcgattgaacgcatttgtggatcaaacgagagctgacgatggataccacggaccagacggcggttctcttccggagaaatcccaccccgaccatcactctcgatgagagccacgatccattcgcgcagaaaatcgtgtgaggctgctgtgttttctaggccacgcaacggcgccaacccgctgggtgtgcctctgtgaagtgccaaatatgttcctcctgtggcgcgaaccagcaattcgccaccccggtccttgtcaaagaacacgaccgtacctgcacggtcgaccatgctctgttcgagcatggctagaacaaacatcatgagcgtcgtcttacccctcccgataggcccgaatattgccgtcatgccaacatcgtgctcatgcgggatatagtcgaaaggcgttccgccattggtacgaaatcgggcaatcgcgttgccccagtggcctgagctggcgccctctggaaagttttcgaaagagacaaaccctgcgaaattgcgtgaagtgattgcgccagggcgtgtgcgccacttaaaattccccggcaattgggaccaataggccgcttccataccaataccttcttggacaaccacggcacctgcatccgccattcgtgtccgagcccgcgcgcccctgtccccaagactattgagatcgtctgcatagacgcaaaggctcaaatgatgtgagcccataacgaattcgttgctcgcaagtgcgtcctcagcctcggataatttgccgatttgagtcacggctttatcgccggaactcagcatctggctcgatttgaggctaagtttcgcgtgcgcttgcgggcgagtcaggaacgaaaaactctgcgtgagaacaagtggaaaatcgagggatagcagcgcgttgagcatgcccggccgtgtttttgcagggtattcgcgaaacgaatagatggatccaacgtaactgtcttttggcgttctgatctcgagtcctcgcttgccgcaaatgactctgtcggtataaatcgaagcgccgagtgagccgctgacgaccggaaccggtgtgaaccgaccagtcatgatcaaccgtagcgcttcgccaatttcggtgaagagcacaccctgcttctcgcggatgccaagacgatgcaggccatacgctttaagagagccagcgacaacatgccaaagatcttccatgttcctgatctggcccgtgagatcgttttccctttttccgcttagcttggtgaacctcctctttaccttccctaaagccgcctgtgggtagacaatcaacgtaaggaagtgttcattgcggaggagttggccggagagcacgcgctgttcaaaagcttcgttcaggctagcggcgaaaacactacggaagtgtcgcggcgccgatgatggcacgtcggcatgacgtacgaggtgagcatatattgacacatgatcatcagcgatattgcgcaacagcgtgttgaacgcacgacaacgcgcattgcgcatttcagtttcctcaagctcgaatgcaacgccatcaattctcgcaatggtcatgatcgatccgtcttcaagaaggacgatatggtcgctgaggtggccaatataagggagatagatctcaccggatctttcggtcgttccactcgcgccgagcatcacaccattcctctccctcgtgggggaaccctaattggatttgggctaacagtagcgcccccccaaactgcactatcaatgcttcttcccgcggtccgcaaaaatagcaggacgacgctcgccgcattgtagtctcgctccacgatgagccgggctgcaaaccataacggcacgagaacgacttcgtagagcgggttctgaacgataacgatgacaaagccggcgaacatcatgaataaccctgccaatgtcagtggcaccccaagaaacaatgcgggccgtgtggctgcgaggtaaagggtcgattcttccaaacgatcagccatcaactaccgccagtgagcgtttggccgaggaagctcgccccaaacatgataacaatgccgccgacgacgccggcaaccagcccaagcgaagcccgcccgaacatccaggagatcccgatagcgacaatgccgagaacagcgagtgactggccgaacggaccaaggataaacgtgcatatattgttaaccattgtggcggggtcagtgccgccacccgcagattgcgctgcggcgggtccggatgaggaaatgctccatgcaattgcaccgcacaagcttggggcgcagctcgatatcacgcgcatcatcgcattcgagagcgagaggcgatttagatgtaaacggtatctctcaaagcatcgcatcaatgcgcacctccttagtataagtcgaataagacttgattgtcgtctgcggatttgccgttgtcctggtgtggcggtggcggagcgattaaaccgccagcgccatcctcctgcgagcggcgctgatatgacccccaaacatcccacgtctcttcggattttagcgcctcgtgatcgtcttttggaggctcgattaacgcgggcaccagcgattgagcagctgtttcaacttttcgcacgtagccgtttgcaaaaccgccgatgaaattaccggtgttgtaagcggagatcgcccgacgaagcgcaaattgcttctcgtcaatcgtttcgccgcctgcataacgacttttcagcatgtttgcagcggcagataatgatgtgcacgcctggagcgcaccgtcaggtgtcagaccgagcatagaaaaatttcgagagtttatttgcatgaggccaacatccagcgaatgccgtgcatcgagacggtgcctgacgacttgggttgcttggctgtgatcttgccagtgaagcgtttcgccggtcgtgttgtcatgaatcgctaaaggatcaaagcgactctccaccttagctatcgccgcaagcgtagatgtcgcaactgatggggcacacttgcgagcaacatggtcaaactcagcagatgagagtggcgtggcaaggctcgacgaacagaaggagaccatcaaggcaagagaaagcgaccccgatctcttaagcataccttatctccttagctcgcaactaacaccgcctctcccgttggaagaagtgcgttgttttatgttgaagattatcgggagggtcggttactcgaaaattttcaattgcttctttatgatttcaattgaagcgagaaacctcgcccggcgtcttggaacgcaacatggaccgagaaccgcgcatccatgactaagcaaccggatcgacctattcaggccgcagttggtcaggtcaggctcagaacgaaaatgctcggcgaggttacgctgtctgtaaacccattcgatgaacgggaagcttccttccgattgctcttggcaggaatattggcccatgcctgcttgcgctttgcaaatgctcttatcgcgttggtatcatatgccttgtccgccagcagaaacgcactctaagcgattatttgtaaaaatgtttcggtcatgcggcggtcatgggcttgacccgctgtcagcgcaagacggatcggtcaaccgtcggcatcgacaacagcgtgaatcttggtggtcaaaccgccacgggaacgtcccatacagccatcgtcttgatcccgctgtttcccgtcgccgcatgttggtggacgcggacacaggaactgtcaatcatgacgacattctatcgaaagccttggaaatcacactcagaatatgatcccagacgtctgcctcacgccatcgtacaaagcgattgtagcaggttgtacaggaaccgtatcgatcaggaacgtctgcccagggcgggcccgtccggaagcgccacaagatgacattgatcacccgcgtcaacgcgcggcacgcgacgcggcttatttgggaacaaaggactgaacaacagtccattcgaaatcggtgacatcaaagcggggacgggttatcagtggcctccaagtcaagcctcaatgaatcaaaatcagaccgatttgcaaacctgatttatgagtgtgcggcctaaatgatgaaatcgtccttctagatcgcctccgtggtgtagcaacacctcgcagtatcgccgtgctgaccttggccagggaattgactggcaagggtgctttcacatgaccgctcttttggccgcgatagatgatttcgttgctgctttgggcacgtagaaggagagaagtcatatcggagaaattcctcctggcgcgagagcctgctctatcgcgacggcatcccactgtcgggaacagaccggatcattcacgaggcgaaagtcgtcaacacatgcgttataggcatcttcccttgaaggatgatcttgttgctgccaatctggaggtgcggcagccgcaggcagatgcgatctcagcgcaacttgcggcaaaacatctcactcacctgaaaaccactagcgagtctcgcgatcagacgaaggccttttacttaacgacacaatatccgatgtctgcatcacaggcgtcgctatcccagtcaatactaaagcggtgcaggaactaaagattactgatgacttaggcgtgccacgaggcctgagacgacgcgcgtagacagttttttgaaatcattatcaaagtgatggcctccgctgaagcctatcacctctgcgccggtctgtcggagagatgggcaagcattattacggtcttcgcgcccgtacatgcattggacgattgcagggtcaatggatctgagatcatccagaggattgccgcccttaccttccgtttcgagttggagccagcccctaaatgagacgacatagtcgacttgatgtgacaatgccaagagagagatttgcttaacccgatttttttgctcaagcgtaagcctattgaagcttgccggcatgacgtccgcgccgaaagaatatcctacaagtaaaacattctgcacaccgaaatgcttggtgtagacatcgattatgtgaccaagatccttagcagtttcgcttggggaccgctccgaccagaaataccgaagtgaactgacgccaatgacaggaatcccttccgtctgcagataggtaccatcgatagatctgctgcctcgcgcgtttcggtgatgacggtgaaaacctctgacacatgcagctcccggagacggtcacagcttgtctgtaagcggatgccgggagcagacaagcccgtcagggcgcgtcagcgggtgttggcgggtgtcggggcgcagccatgacccagtcacgtagcgatagcggagtgtatactggcttaactatgcggcatcagagcagattgtactgagagtgcaccatatgcggtgtgaaataccgcacagatgcgtaaggagaaaataccgcatcaggcgctcttccgcttcctcgctcactgactcgctgcgctcggtcgttcggctgcggcgagcggtatcagctcactcaaaggcggtaatacggttatccacagaatcaggggataacgcaggaaagaacatgtgagcaaaaggccagcaaaaggccaggaaccgtaaaaaggccgcgttgctggcgtttttccataggctccgcccccctgacgagcatcacaaaaatcgacgctcaagtcagaggtggcgaaacccgacaggactataaagataccaggcgtttccccctggaagctccctcgtgcgctctcctgttccgaccctgccgcttaccggatacctgtccgcctttctcccttcgggaagcgtggcgctttctcatagctcacgctgtaggtatctcagttcggtgtaggtcgttcgctccaagctgggctgtgtgcacgaaccccccgttcagcccgaccgctgcgccttatccggtaactatcgtcttgagtccaacccggtaagacacgacttatcgccactggcagcagccactggtaacaggattagcagagcgaggtatgtaggcggtgctacagagttcttgaagtggtggcctaactacggctacactagaaggacagtatttggtatctgcgctctgctgaagccagttaccttcggaaaaagagttggtagctcttgatccggcaaacaaaccaccgctggtagcggtggtttttttgtttgcaagcagcagattacgcgcagaaaaaaaggatctcaagaagatcctttgatcttttctacggggtctgacgctcagtggaacgaaaactcacgttaagggattttggtcatgagattatcaaaaaggatcttcacctagatccttttaaattaaaaatgaagttttaaatcaatctaaagtatatatgagtaaacttggtctgacagttaccaatgcttaatcagtgaggcacctatctcagcgatctgtctatttcgttcatccatagttgcctgactccccgtcgtgtagataactacgatacgggagggcttaccatctggccccagtgctgcaatgataccgcgagacccacgctcaccggctccagatttatcagcaataaaccagccagccggaagggccgagcgcagaagtggtcctgcaactttatccgcctccatccagtctattaattgttgccgggaagctagagtaagtagttcgccagttaatagtttgcgcaacgttgttgccattgctgcaggggggggggggggggggttccattgttcattccacggacaaaaacagagaaaggaaacgacagaggccaaaaagctcgctttcagcacctgtcgtttcctttcttttcagagggtattttaaataaaaacattaagttatgacgaagaagaacggaaacgccttaaaccggaaaattttcataaatagcgaaaacccgcgaggtcgccgccccgtaacctgtcggatcaccggaaaggacccgtaaagtgataatgattatcatctacatatcacaacgtgcgtggaggccatcaaaccacgtcaaataatcaattatgacgcaggtatcgtattaattgatctgcatcaacttaacgtaaaaacaacttcagacaatacaaatcagcgacactgaatacggggcaacctcatgtcccccccccccccccccctgcaggcatcgtggtgtcacgctcgtcgtttggtatggcttcattcagctccggttcccaacgatcaaggcgagttacatgatcccccatgttgtgcaaaaaagcggttagctccttcggtcctccgatcgttgtcagaagtaagttggccgcagtgttatcactcatggttatggcagcactgcataattctcttactgtcatgccatccgtaagatgcttttctgtgactggtgagtactcaaccaagtcattctgagaatagtgtatgcggcgaccgagttgctcttgcccggcgtcaacacgggataataccgcgccacatagcagaactttaaaagtgctcatcattggaaaacgttcttcggggcgaaaactctcaaggatcttaccgctgttgagatccagttcgatgtaacccactcgtgcacccaactgatcttcagcatcttttactttcaccagcgtttctgggtgagcaaaaacaggaaggcaaaatgccgcaaaaaagggaataagggcgacacggaaatgttgaatactcatactcttcctttttcaatattattgaagcatttatcagggttattgtctcatgagcggatacatatttgaatgtatttagaaaaataaacaaataggggttccgcgcacatttccccgaaaagtgccacctgacgtctaagaaaccattattatcatgacattaacctataaaaataggcgtatcacgaggccctttcgtcttcaagaattggtcgacgatcttgctgcgttcggatattttcgtggagttcccgccacagacccggattgaaggcgagatccagcaactcgcgccagatcatcctgtgacggaactttggcgcgtgatgactggccaggacgtcggccgaaagagcgacaagcagatcacgcttttcgacagcgtcggatttgcgatcgaggatttttcggcgctgcgctacgtccgcgaccgcgttgagggatcaagccacagcagcccactcgaccttctagccgacccagacgagccaagggatctttttggaatgctgctccgtcgtcaggctttccgacgtttgggtggttgaacagaagtcattatcgtacggaatgccaagcactcccgaggggaaccctgtggttggcatgcacatacaaatggacgaacggataaaccttttcacgcccttttaaatatccgttattctaataaacgctcttttctcttag

SEQ ID NO: 22 - DNA, 1405 bp, Zea mays
ggaactaaaaagcacaagaaatggcggccgccttctcctccaccgtcggagctccggcctccaccccgaccaggagcagcttcctcgggaagaagctcaacaagccgcaggtgtccgcggccgtgacctaccatggcaagagctccagcagcaacagcaggttcaaggcgatggctgccaaggaggtggacgagacgaagcagaccgacgaggacaggtggaagggcctggcctacgacatctcggacgaccagcaggacatcaccaggggcaagggcctcgtcgacaacctcttccaggcgcctatgggggacggcacccacgtcgccgtgctcagctcctacgactacatcagccagggccaaaagtcttacaacttcgacaacatgatggatggcttctacatagccaagggcttcatggacaagctcgtcgtccacctctccaagaacttcatgaccctgccaaacatcaaggttcccctcatcctgggtatctggggaggcaaaggccagggaaaatcgttccaatgcgagctggtcttcgccaagatgggcatcacccccatcatgatgagcgccggcgagctggagagcggcaacgccggagagcccgccaagctcatcaggcagcgctaccgtgaggcctccgacctcatcaagaagggcaagatgtcctgcctcttcatcaacgacttggacgccggcgcgggtcgcatgggcggcaccacccagtacacggtgaacaaccagatggtcaacgccaccctgatgaacatcgccgacaaccccaccaacgtgcagctcccggggatgtacaacaaggaggacaacccccgcgtgcccatcatcgtcaccggcaacgacttctccacgctctacgcgccgctcatccgcgacggccgcatggagaagttctactgggcgcccacccgcgaggaccgcatcggcgtctgcaagggcatcttccgcaccgacggcgtcgacgaggagcacgtcgtccagctggtcgacaccttccctggccagtccatcgatttcttcggcgcgctgcgtgcccgggtctacgacgacgaggtccgacggtgggtgagcgagaccggcgtcgagaacatcgccaggaagctcgtcaactccaaggagggcccgcccacgttcgagcagcccaagataacgatcgagaagctcttggagtacggacacatgctggtggcggagcaggagaacgtcaagcgtgtgcagcttgctgacaagtacctcaacgaggctgctcttggtgaagccaacgaggacgccatgaagactggctccttcttcaagtagaaagcaactctttgctattgctagctaggcgcgaggccggcataggatcgaggaggtgaatatatatattacttggatagttt

SEQ ID NO: 23 - DNA, 1580 bp, artificial
  ZmRCA1 (MOD1)
atggcggccgccttctcctccaccgtcggagctccggtgggtgaccgcgcgtgttaattccaagcatctgctagctgctctgctactagttcagcgtcgggatcttcttcttcatgcatgcatttcatgatcatatatatatctcgatccttgagaccttcttgacggcatatatatgtatatgtacatgcatcatgcatcgaccgatcatcaggcctccaccccgaccaggagcagcttcctcgggaagaagctcaacaagccgcaggtgtcgtccgcggccgtgacctatcatggcaagagctccagcagcaacagcaggttcaaggccatggctgccaaggaagtcgatgaaacaaaacaatcggaccaggatcgttggaaaggcctggcctacgacatctcggacgaccagcaggacatcaccaggggcaagggcatggttgacaacctcttccaggcccctaccggggacggcacccacgtcgccgtgctcagctcctacgactacatcagccagggccaaaagtcctacaacttcgacaacatgatggatggcttctacatagccaagggcttcatggacaagctcgtcgtccatttgagcaaaaattttatgaccctgccaaacatcaaggttcccctcatcctgggtatctggggaggcaaaggccagggaaaatcgttccaatgcgagctggtcttcgccaagatgggcatcacgtacgttaatttatttcgattcgtctattattattgtcttcgataatatatactagctagctagtagtaaatcattccaatgcatgcatgcatgcagccccatcacgatgagcgccggcgagctggagagcggcaacgccggagagcccgccaagctcatcaggcagcgctaccgtgaggccgccgacatcatcaagaagggcaagatgtcctgcctcttcatcaacgacctcgacgccggcgcgggtcgcatgggcggcaccacccagtacacggtgaacaaccagatggtcaacgccaccctgatgaacatcgccgacaaccccaccaacgtgcagctcccggggatgtacaacaaggtggacaacgcacgcgtgcccatcatcgtcaccggcaacgacttctccacgctctacgcgccgctcatccgcgacggccgcatggagaagttctactgggcgcccacccgcgaggaccgcatcggcatctgcaagggcatcttccgcaccgacggcgtcgacgaggagcacgtcgtccagctggtcgacaccttccctggccagtccatcgacttcttcggcgcgctgcgtgcccgggtctacgacgacgaggtccgaaaatgggtggctgagaccggcgtcgagaacatcgccaggaagctcgtcaactccaaggagggcccgcccacgttcgagcagcccaagataacgatcgagaagctcttggagtacggacacatgctggtggcggagcaggagaacgtcaagcgtgtgcagcttgctgacaagtacctcaacgaggctgctcttggtgaagccaacgaggacgccatgaagactggctccttcttcaagtag

SEQ ID NO: 24 - DNA, 1580 bp, artificial
  ZmRCA1 (MOD2) (variant 1)
atggcggccgccttctcctccaccgtcggagctccggtgggtgaccgcgcgtgttaattccaagcatctgctagctgctctgctactagttcagcgtcgggatcttcttcttcatgcatgcatttcatgatcatatatatatctcgatccttgagaccttcttgacggcatatatatgtatatgtacatgcatcatgcatcgaccgatcatcaggcctccaccccgaccaggagcagcttcctcgggaagaagctcaacaagccgcaggtgtcgtccgcggccgtgacctatcatggcaagagctccagcagcaacagcaggttcaaggccatggctgccaaggaagtcgatgaaacaaaacaatcggaccaggatcgttggaaaggcctggcctacgacatctcggacgaccagcaggacatcaccaggggcaagggcctcgtcgacaacctcttccaggcgcctaccggggacggcacccacgtcgccgtgctcagctcctacgactacatcagccagggccaaaagacctacaacttcgacaacatgatggatggcttctacatatccaagagcttcatggacaagctcgtcgtccatttgagcaaaaattttatgtccctgccaaacatcaaggttcccctcatcctgggtatctggggaggcaaaggccagggaaaatcgttccaatgcgagctggtcttctccaagatgggcatcatgtacgttaatttatttcgattcgtctattattattgtcttcgataatatatactagctagctagtagtaaatcattccaatgcatgcatgcatgcagccccatcatgatgagcgccggcgagctggagagcggcaacgccggagagcccgccaagctcatcaggcagcgctaccgtgaggccgccgacctgatcaagaagggcaagatgtcctgcctcttcatcaacgacctcgacgccggcgcgggtcgcatgggcggcaccacccagtacacggtgaacaaccagatggtcaacgccaccctgatgaacatcgccgacaaccccaccaacgtgcggctcccggggatgtacaacaaggaggacaacccccgcgtgcccatcatcgtcaccggcaacgacttctccacgctctacgcgccgctcatccgcgacggccgcatggagaagttctactgggcgcccacccgcgaggaccgcatcggcatctgcaagggcatcttccgcaccgacggcgtcgacgaggagcacgtcgtccgtctggtcgacaccttccctggccagtccatcgacttcttcggcgcgctgcgtgcccgggtctacgacgacgaggtccgaaagtgggtgagcgagaccggcgtcgagaacatcgccaagaagctcgtcaactccaaggagggcccgcccacgttcgagcagcccaagatgacgatcgagaagctcttggagtacggacacatgctggtggcggagcaggagaacgtcaagcgtgtgcagcttgctgacaagtacctcaacgaggctgctcttggtgaagccaacgaggacgccatgaagactggctccttcttcaagtag

SEQ ID NO: 25 - DNA, 1580 bp, artificial
  ZmRCA1 (MOD3)
atggcggccgccttctcctccaccgtcggagctccggtgggtgaccgcgcgtgttaattccaagcatctgctagctgctctgctactagttcagcgtcgggatcttcttcttcatgcatgcatttcatgatcatatatatatctcgatccttgagaccttcttgacggcatatatatgtatatgtacatgcatcatgcatcgaccgatcatcaggcctccaccccgaccaggagcagcttcctcgggaagaagctcaacaagccgcaggtgtcgtccgcggccgtgacctatcatggcaagagctccagcagcaacagcaggttcaaggccatggctgccaaggaagtcgatgaaacaaaacaatcggaccaggatcgttggaaaggcctggcctacgacgtctcggacgaccagcaggacatcaccaggggcaagggcctcgtcgacaacctcttccaggcgcctaccggggacggcacccacgtcgccgtgctcagctcctacgactacatcagccagggccaaaagtcctacgatttcgacaacatgatggatggcttctacatagccaagagcttcatggacaagctcgtcgtccatttgagcaaaaattttatgtccctgccaaacatcaaggttcccctcatcctgggtatctggggaggcaaaggccagggaaaatcgttccaatgcgagctggtcttcgccaagatgggcatcacgtacgttaatttatttcgattcgtctattattattgtcttcgataatatatactagctagctagtagtaaatcattccaatgcatgcatgcatgcagccccatcatgatgagcgccggcgagctggagagcggcaacgccggagagcccgccaagctcatcaggcagcgctaccgtgaggccgccgacaccatcaagaagggcaagatgtcctgcctcttcatcaacgacctcgacgccggcgcgggtcgcatgggcggcaccacccagtacacggtgaacaaccagatggtcaacgccaccctgatgaacatcgccgacaaccccaccaacgtgcggctcccggggatgtacaacaaggaggacaacccccgcgtgcccatcatcgtcaccggcaacgacttctccacgctctacgcgccgctcatccgcgacggccgcatggagaagttctactgggcgcccacccgcgaggaccgcatcggcgtctgcaagggcatcttccgcaccgacggcgtcgacgaggagcacgtcgtccgtctggtcgacaccttccctggccagtccatcgacttcttcggcgcgctgcgtgcccgggtctacgacgacgaggtccgaaagtgggtgagcgagaccggcgtcgagaacatcgccaagaagctcgtcaactccaaggagggcccgcccacgttcgagcagcccaagataacgatcgagaagctcttggagtacggacacatgctggtggcggagcaggagaacgtcaagcgtgtgcagcttgctgacaagtacctcaacgaggctgctcttggtgaagccaacgaggacgccatgaagactggctccttcttcaagtag

SEQ ID NO: 26 - DNA, 2913 bp, Zea mays
atggcgagcaccaaagcgccgggcccgggcgaaaaacatcattctatcgacgcgcagctccgtcagctggtcccaggcaaggtctccgaggacgacaagctcatcgagtacgatgcgctgctcgtcgaccgcttcctcaacatcctccaggacctccacgggcccagccttcgcgaatttgtccaggagtgctacgaggtctcagccgactacgagggcaaaggagacacgacgaagctgggcgagctcggcgccaagctcacggggctggcccccgccgacgccatcctcgtggcgagctccatcctgcacatgctcaacctcgccaacctggccgaggaggtgcagatcgcgcaccgccgccgcaacagcaagctcaagaaaggtgggttcgccgacgagggctccgccaccaccgagtccgacatcgaggagacgctcaagcgcctcgtgtccgaggtcggcaagtcccccgaggaggtgttcgaggcgctcaagaaccagaccgtcgacctcgtcttcaccgcgcatcctacgcagtccgcccgccgctcgctcctgcaaaaaaatgccaggatccgaaattgtctgacccagctgaatgccaaggacatcactgacgacgacaagcaggagctcgatgaggctctgcagagagagatccaagcagccttcagaaccgatgaaatcaggagggcacaacccaccccgcaggatgaaatgcgctatgggatgagctacatccatgagactgtatggaagggtgtgcctaagttcttgcgccgtgtggatacagccctgaagaatatcggcatcaatgagcgccttccctacaatgtttctctcattcggttctcttcttggatgggtggtgaccgcgatggaaatccaagagttaccccggaggtgacaagagatgtatgcttgctggccagaatgatggctgcaaacttgtacatcgatcagattgaagagctgatgtttgagctctctatgtggcgctgcaacgatgagcttcgtgttcgtgccgaagagctccacagttcgtctggttccaaagttaccaagtattacatagaattctggaagcaaattcctccaaacgagccctaccgggtgatactaggccatgtaagggacaagctgtacaacacacgcgagcgtgctcgccatctgctggcatctggagtttctgaaatttcagcggaatcgtcatttaccagtatcgaagagttccttgagccacttgagctgtgctacaaatcactgtgtgactgcggcgacaaggccatcgcggacgggagcctcctggacctcctgcgccaggtgttcacgttcgggctctccctggtgaagctggacatccggcaggagtcggagcggcacaccgacgtgatcgacgccatcaccacgcacctcggcatcgggtcgtaccgcgagtggtccgaggacaagaggcaggagtggctgctgtcggagctgcgaggcaagcgcccgctgctgcccccggaccttccccagaccgacgagatcgccgacgtcatcggcgcgttccacgtcctcgcggagctcccgcccgacagcttcggcccctacatcatctctatggcgacggccccctcggacgtgctcgccgtagagctcctgcagcgcgagtgcggcgtgcgccagccgctgcccgtggtgccgctgttcgagaggctggccgacctgcagtcggcgcccgcgtccgtggagcgcctcttctcggtggactggtacatggaccggatcaagggcaagcagcaggtcatggtcggctactccgactccggcaaggacgccggccgcctgtccgcggcgtggcagctgtacagggcgcaggaggagatggcgcaggtggccaagcgctacggcgtcaagctcaccttgttccacggccgcggaggcaccgtgggcaggggtggcgggcccacgcaccttgccatcctgtcccagccgccggacaccatcaacgggtccatccgtgtgacggtgcagggcgaggtcatcgagttctgcttcggggaggagcacctgtgcttccagactctgcagcgcttcacggccgccacgctggagcacggcatgcacccgccggtctctcccaagcccgagtggcgcaagctcatggacgagatggcggtcgtggccacggaggagtaccgctcggtcgtcgtcaaggagccgcgcttcgtcgagtacttcagatcggctacaccggagaccgagtacgggaggatgaacatcggcagccggccagccaagaggaggcccggcggcggcatcacgaccctgcgcgccatcccctggatcttctcgtggactcagaccaggttccaccttcccgtgtggctgggagtcggcgccgccttcaagttcgccatcgacaaggacgtcaggaacttccaggtcctcaaagagatgtacaacgagtggccattcttcagggtcaccctggacctgctggagatggttttcgccaagggagaccccggcattgccggcttgtatgacgagctgcttgtggcggaagaactcaagccctttgggaagcagctcagggacaaatacgtggagacacagcagcttctcctccagatcgctgggcacaaggatattcttgaaggcgatccattcctgaagcaggggctggtgctgcgcaacccctacatcaccaccctgaacgtgttccaggcctacacgctgaagcggataagggaccccaacttcaaggtgacgccccagccgccgctgtccaaggagttcgccgacgagaacaagcccgccggactggtcaagctgaacccggcgagcgagtacccgcccggcctggaagacacgctcatcctcaccatgaagggcatcgccgccggcatgcagaacactggctag

SEQ ID NO: 27 - DNA, 4476 bp, artificial
  ZmPEPC MOD2
atggcgtcgaccaaggctcccggccccggcgagaagcaccactccatcgacgcgcagctccgtcagctggtcccaggcaaggtctccgaggacgacaagctcatcgagtacgatgcgctgctcgtcgaccgcttcctcaacatcctccaggacctccacgggcccagccttcgcgaatttgtaactaaccactgccgccgcccatttcttcttcgaccggttgccgcctgcgcgcggcactgctcgtacgtctccccgccagtgcttactgtaatgcatgcatgcaggtccaggagtgctacgaggtctcagccgactacgagggcaaaggagacacgacgaagctgggcgagctcggcgccaagctcacggggctggcccccgccgacgccatcctcgtggcgagctccatcctgcacatgctcaacctcgccaacctcgccgaggaggtgcagatcgcgcgccgccgccgcaacagcaagctcaagaaaggtgggttcgccgacgagggctccgccaccaccgagtccgacatcgaggagacgctcaagcgcctcgtgtccgaggtcggcaagtcccccgaggaggtgttcgaggcgctcaagaaccagaccatcgacctcgtcttcaccgcgcatcccacacagtccgcccgccgctcgctcctgcaaaaaaatgccgggtatatatttttcaatggcttgatcgatatgctactcacgttatatacccttaagtcttaaccattattattatttttgataaataaaaatgtcggtcttgtcgctgcaggatccggaattgtctgacccagctgaatgccaaggacatcactgacgacgacaagcaggagctcgatgaggctctgcagagagaggtacgtacatattacatttcacaccagggaatgcaagaactttatcaagagacattcattctttgatagagatagaatagaacacatgcacagtacacgtggactcatgagcttgcaagacatcgagcacgacacgtgtaagttagtgcgccagagaaatcttcaatttatatgtcaagtcaggtcaggttctcccattaaaacacatataaataaatattcattattatcaagctaaggtaataaacaaccaaacttttccactatttaaactgtctttgcaaactccaaagtagaaactaacctaatcaggaaagaactagactgcacatttatgttttaacaatgcaatgagagaactgctacatgtataacagaattatttatatgaggccgacttgacttaagattcaatgttgaagaccacttgatgaaaactacactgaattatttatatgctattctccagctgtgctcaaagcattttccttttacttaaaaaagatcattttgtacaaagatctcttactcatatagagccatttgagtagaacttcggtaccacagatgcattaatggtttagttgtaatcaagttgttgtactcatcattatattttcctaacaagtagggcatccagtttctccttgatgaggaatcaaacctagatagccttaactccacaccctcaattagctaggctatgctcaagttcctagtgttacaaatttcagacgagtcataatgtcatcactgagcactcggtaaagagcgtctctctcatggtgcatatatatgatgcagaccacctgagaagtttactgcttcaagccaccaaagtggtatttttgttgtttgggttgtttagttctaattccttttcttgggtgttcacagatccaagcagccttcagaaccgatgaaatcaggagggcacaacccaccccccaggacgaaatgcgctatgggatgagctacatccatgagactgtatggaagggcgtgcctaagttcttgcgccgtgtggatacagccctgaagaatatcggcatcaatgagcgccttccctacaatgtttctctcattcggttctcttcttggatgggtggtgaccgcgatggtacatttctgcctacccttttcaataaagtggcaggagctctctgtctttcagcttgagagaaaccttcctgctttactctgactgcaatagatgttcagaaaaactagtctatcatttcgagctctcaggagctagaattttaaaatagaaattatttagtacacctcactaataaaaatttatcatccatacatgctagcacaacatataagcataatttaatcaaatctttatattgcaacctggaacctaacttgttgaattttttatatcacagaattatacgtgtagtattattttatatatcaaagagtgcttatattatatcagtacttgtcctgtcaatattcaaggctaacgtttttcttttctcgccagaaaattatatatacagaattatatgttttttctaagcctgtatatctttgcaatctatcgctatataggaaatccaagagttaccccggaggtgacaagagatgtatgcttgctggccagaatgatggctgcaaacttgtacatcgatcagattgaagagctgatgtttgagctctctatgtggcgctgcaacgatgagcttcgtgttcgtgccgaagagctccacagttcgtctggttccaaagttaccaagtattacatagaattctggaagcaaattcctccaaacgagccctaccgggtgatactaggccatgtaagggacaagctgtacaacacacgcgagcgtgctcgccatctgctggcatctggagtttctgaaatttcagcggaatcgtcatttaccagtatcgaagagttccttgagccacttgagctgtgctacaaatcactgtgtgactgcggcgacaaggccatcgcggacgggagcctcctggacctcctgcgccaggtgttcacgttcgggctctccctggtgaagctggacatccggcaggagtcggagcggcacaccgacgtgatcgacgccatcaccacgcacctcggcatcgggtcgtaccgcgagtggtccgaggacaagaggcaggagtggctgctgtcggagctacgaggcaagcgcccgctgctgcccccggaccttccccagaccgacgagatcgccgacgtcatcggcgcgttccacgtcctcgcggagctcccgcccgacagcttcggcccctacatcatctctatggcgacggccccctcggacgtgctcgccgtagagctcctgcagcgcgagtgcggcatcaagcagccgctgcccgtggtgccgctgttcgagaggctggccgacctgcagtcggcgcccgcgtccgtggagcgcctcttctcggtggactggtacatggaccggatcaagggcaagcagcaggtcatggtcggctactccgactccggcaaggacgccggccgcctgtccgcggcgtggcagctgtacaaggcgcaggaggagatggcgcaggtggccaagcgctacggcgtcaagctcaccttgttccacggccgcggaggcaccgtgggcaggggtggcgggcccacgcaccttgccatcctgtcccagccgccggacaccatcaacgggtccatccgtgtgacggtgcagggcgaggtcatcgagttctgcttcggggaggagcacctgtgcttccagactctgcagcgcttcacggccgccacgctggagcacggcatgcacccgccggtctctcccaagcccgagtggcgcaagctcatggacgagatggcggtcgtggccacggaggagtaccgctcggtcgtcgtcaaggagccgcgcttcgtcgagtacttcagatcggctacaccggagaccgagtacgggaggatgaacatcggcagccggccagccaagaggaggcccggcggcggcatcacgaccctgcgcgccatcccctggatcttctcgtggactcagaccaggttccaccttcccgtgtggctgggagtcggcgccgccttcaagttcgccatcgacaaggacgtcaggaacttccaggtcctcaaagagatgtacaacgagtggccattcttcagggtcaccctggacctgctggagatgattttcgccaagggagaccccggcattgccggcttgtatgacgagctgcttgtggcggaagaactcaagccctttgggaagcagctcagggacaaatacgtggagacacagcagcttctcctccagatcgctgggcacaaggatattcttgaaggcgatccattcctgaagcaggggctggtgctgcgcaacccctacatcaccaccctgaacgtgttccaggcctacacgctgaagcggataagggaccccaacttcaaggtgacgccccagccgccgctgtccaaggagttcgccgacgagaacaagcccgccggactggtcaagctgaacccggcgagcgagtacccgcccggcctggaagacacgctcatcctcaccatgaagggcatcgccgccggcatgcagaacactggctag

SEQ ID NO: 28 - DNA, 5042 bp, artificial
  ZmPEPC MOD3
atggcgtcgaccaaggctcccggccccggcgagaagcaccactccatcgacgcgcagctccgtcagctggtcccaggcaaggtctccgaggacgacaagctcatcgagtacgatgcgctgctcgtcgaccgcttcctcaacatcctccaggacctccacgggcccagccttcgcgaatttgtaactaaccactgccgccgcccatttcttcttcgaccggttgccgcctgcgcgcggcactgctcgtacgtctccccgccagtgcttactgtaatgcatgcatgcaggtccaggagtgctacgaggtctcagccgactacgagggcaaaggagacacgacgaagctgggcgagctcggcgccaagctcacggggctggcccccgccgacgccatcctcgtggcgagctccatcctgcacatgctcaacctcgccaacctcgccgaggaggtgcagatcgcgcgccgccgccgcaacagcaagctcaagaaaggtgggttcgccgacgagggctccgccaccaccgagtccgacatcgaggagacgctcaagcgcctcgtgtccgaggtcggcaagtcccccgaggaggtgttcgaggcgctcaagaaccagaccatcgacctcgtcttcaccgcgcatcccacacagtccgcccgccgctcgctcctgcaaaaaaatgccgggtatatatttttcaatggcttgatcgatatgctactcacgttatatacccttaagtcttaaccattattattatttttgataaataaaaatgtcggtcttgtcgctgcaggatccggaattgtctgacccagctgaatgccaaggacatcactgacgacgacaagcaggagctggacgaagcgttgcagcgcgaggtacgtacatattacatttcacaccagggaatgcaagaactttatcaagagacattcattctttgatagagatagaatagaacacatgcacagtacacgtggactcatgagcttgcaagacatcgagcacgacacgtgtaagttagtgcgccagagaaatcttcaatttatatgtcaagtcaggtcaggttctcccattaaaacacatataaataaatattcattattatcaagctaaggtaataaacaaccaaacttttccactatttaaactgtctttgcaaactccaaagtagaaactaacctaatcaggaaagaactagactgcacatttatgttttaacaatgcaatgagagaactgctacatgtataacagaattatttatatgaggccgacttgacttaagattcaatgttgaagaccacttgatgaaaactacactgaattatttatatgctattctccagctgtgctcaaagcattttccttttacttaaaaaagatcattttgtacaaagatctcttactcatatagagccatttgagtagaacttcggtaccacagatgcattaatggtttagttgtaatcaagttgttgtactcatcattatattttcctaacaagtagggcatccagtttctccttgatgaggaatcaaacctagatagccttaactccacaccctcaattagctaggctatgctcaagttcctagtgttacaaatttcagacgagtcataatgtcatcactgagcactcggtaaagagcgtctctctcatggtgcatatatatgatgcagaccacctgagaagtttactgcttcaagccaccaaagtggtatttttgttgtttgggttgtttagttctaattccttttcttgggtgttcacagatccaagcagccttcagaaccgatgaaatcaggagggcacaacccaccccccaggacgaaatgcgctatgggatgagctacatccatgagactgtatggaagggcgtgcctaagttcttgcgccgtgtggatacagccctgaagaatatcggcatcaatgagcgccttccctacaatgtttctctcattcggttctcttcttggatgggtggtgaccgcgatggtacatttctgcctacccttttcaataaagtggcaggagctctctgtctttcagcttgagagaaaccttcctgctttactctgactgcaatagatgttcagaaaaactagtctatcatttcgagctctcaggagctagaattttaaaatagaaattatttagtacacctcactaataaaaatttatcatccatacatgctagcacaacatataagcataatttaatcaaatctttatattgcaacctggaacctaacttgttgaattttttatatcacagaattatacgtgtagtattattttatatatcaaagagtgcttatattatatcagtacttgtcctgtcaatattcaaggctaacgtttttcttttctcgccagaaaattatatatacagaattatatgttttttctaagcctgtatatctttgcaatctatcgctatataggaaatccaagagttaccccggaggtgacaagagatgtatgcttgctggccagaatgatggctgcaaacttgtacatcgatcagattgaagagctgatgtttgaggtactgtacatccatactgcagatttgtttgattgaatgctctatgatttttttgcttgccctgttttttgctgtctccggtccataccagaactctcatgcatgcatcgtctgatatatctgtagctctctatgtggcgctgcaacgatgagcttcgtgttcgtgccgaagagctccacagttcgtctggttccaaagttaccaagtattacataggtaaccacaaacagaagcatttatgtttgcttaatttttgcctgccgtacagccttttgcaaaagtctccactagtgttttcaaattaatttgagggctcttttggcatcttttctgaagtgtatttgctggcgcagaattctggaagcaaattcctccaaacgagccctaccgggtgatactaggccatgtaagggacaagctgtacaacacacgcgagcgtgctcgccatctgcttgcgtcaggcgtgagcgagatttcagcggaagcgtcatttaccagtatcgaagaggtaaatatcgtcatgtatatatattatatatattcatagtatgacatcagcactgcaactaacaaaaaaaaaatcactactgtcgtgcatgcatgcagttccttgagccacttgagctgtgctacaaatcactgtgtgactgcggcgacaaggccatcgcggacgggagcctcctggacctcctgcgccaggttttcacgttcgggctctccctggtgaagctggacatccggcaggagtcggagcggcacaccgacgtgatcgacgccatcaccacgcacctcggcatcgggtcgtaccgcgagtggtccgaggacaagaggcaggagtggctgctgtcggagctgaagggcaagcgcccgctgctgcccccggaccttccccagaccgacgagatcgccgacgtcatcggcgcgttccacgtcctcgcggagctcccgcccgacagcttcggcccctacatcatctctatggcgacggccccctcggacgtgctcgccgtagagctcctgcagcgcgagtgcggcgtgcgccagccgctgcccgtggtgccgctgttcgagaggctggccgacctgcagtcggcgcccgcgtccgtggagcgcctcttctcggtggactggtacatggaccggatcaagggcaagcagcaggtcatggtcggctactccgactccggcaaggacgccggccgcctgtccgcggcgtggcagctgtacaaggcgcaggaggagatggcgcaggtggccaagcgctacggcgtcaagctcaccttgttccacggccgcggaggcaccgtgggcaggggtggcgggcccacgcaccttgccatcctgtcccaaccgccggacaccatcaacgggtccatccgtgtgacggtgcagggcgaggtcatcgagttctgcttcggggaggagcacctgtgcttccagactctgcagcgcttcacggccgccacgctggagcacggcatgcacccgccggtctctcccaagcccgagtggcgcaagctcatggacgagatggcggtcgtggccacggaggagtaccgctccgtcgtcgtcaaggagccgcgcttcgtcgagtacttcagatcggtatgctgccattgcccattgctttgtgacgatcgaattcatccatgtcgatcgttcttttcattcattcgagcgtttgtgcgtcactcactatcaggctacaccggagaccgagtacgggaggatgaacatcggcagccggccagccaagaggaggcccggcggcggcatcacgaccctgcgcgccatcccctggatcttctcgtggacccagaccaggttccacctccccgtgtggctgggagtcggcgccgcattcaagttcgccatcgacaaggacgtcaagaacttccaggtcctcaaagagatgtacaacgagtggccattcttcagggtcaccctggacctgctggagatggttttcgccaagggagaccccggcattgccggcttgtatgacgagctgcttgtggcagaagaactcaagccctttgggaagcagctcagggacaaatacgtggagacacagcagcttctcctccaggtacaaaaaccagcaactcactgcactgcacttcacttcacttcactgtatgaataaaagtctggtgtctggttcctgatcgatgactgactactccactttgtgcagatcgctgggcacaaggatattcttgaaggcgatccattcctgaagcaggggctggtgctgcgcaacccctacatcaccaccctgaacgtgttccaggcctacacgctgaagcggataagggaccccaacttcaaggtgacgccccagccgccgctgtccaaggagttcgccgacgagaacaagcccgccggactggtcaagctgaaccccgcgagcgagtacccgcccggcctggaagacacgctcatcctcaccatgaagggcatcgccgccggcatgcagaacactggctag

SEQ ID NO: 29 - DNA, 2904 bp, Zea mays
atggctgccttagggccgaagatggagcgtctgtcgtcgatcgacgcgcagctgcggatgctggtgccggggaaggtttcggaggacgataagctcatcgagtacgacgctctcctcctcgatcggttcctcgacatccttcaggacctccatggcgacgacctcaaggaaatggttcaagaatgctatgaggtagctgctgagtatgaaacaaaacatgacttgcaaaagcttgatgaactcgggaagatgataacaagcttggatcctggggactctatcgtgattgctaagtctctctcgcacatgcttaacttggccaacttggctgaggaagtccagatagcctacaggaggagaatcaagctcaagaagggagactttgctgatgagaactcggcaatcacagaatctgacattgaggaaacacttaagaggcttgttgttgacctgaagaagtcacctgctgaggtatttgatgccctcaagagccagactgttgatctggttttgactgcacatccaacacagtctgtgaggaggtcactgctccagaaacactcgaggatacgcaactgtttggttcaactctactcaaaagatatcactccggatgataagcaggaacttgatgaggctctgcaaagagagatccaagctgcctttagaactgatgagatccgaagaacacagcccactccccaagatgaaatgcgtgctggtatgagctacttccacgaaacaatttggaagggtgttccaaagttcttgcgccgggttgatactgcattgaagaacattgggattaacgagcgtgttccttacaatgcacctcttattcaattctcttcttggatggggggagatcgtgatggaaatccaagagtgacaccagaggttaccagggatgtctgcttgcttgccagaatgatggcatcaaacttgtactgctctcagattgaggatctcatgtttgagttgtctatgtggcgatgcagtgatgaactgcgcatgcgagctgatgtgctgcatctctccactaagaaggatgccaaacattacatagagttttggaagaaggttcctccaaatgagccatatcgggtgatactgagtgatgtcagggataaactgtacaacactcgtgaacggtcacgagagcttttatccagtgggcattctgatattcctgaggaagctacattgacaaatgttgagcagctgttggagcccttggaactatgttacagatcactctgtgcttgtggtgactctgtaattgctgatggaacccttctggatttcttgcgtcaagtgtccacctttggactctcccttgtgaggcttgacattaggcaagagtcagataggcatactgatgtccttgatgccatcactacatacctggggataggatcttaccgtgaatggactgaagaacgccgccaagaatggttactgtctgaacttaatggcaagcgccctctgtttggctcagaccttcccaagactgaggaaatttctgatgttctagacacattccatgttattgctgagcttccctctgacaattttggtgcgtatatcatttccatggcgacagctccgtcggacgtccttgctgttgaactcctccaacgtgagtgtcatgtgaaaacaccacttagagtagtcccgctgtttgagaagttggccgatcttgaggctgccccggctgcattggccagactgttctcaatagattggtacagacagaggatcaatggcaagcaggaggtcatgattgggtattcagactcgggcaaagatgctggtcgcctctcagcagcttggcagctatacaaagctcaggaggagctcatcaaggttgctaaggactttggtgtgaagttaacgatgttccatggacgtggtgggactgttggaaggggtggtggtcccactcaccttgccatcttgtcccagccaccagacacgatccacggatcactcagggtcactgtgcaaggtgaagtcattgaacagtcatttggtgaggagcacttgtgctttaggacactgcaacgtttcacggctgctaccctggagcatggcatgcacccaccaaatgcaccaaagccagaatggcgagcccttcttgatgagatggcagttgtggcaactgaggaatatcggtccattgtcttcaaagagccacgctttgtcgagtatttccgccttgcaacccctgaaacagagtatggtaggatgaacataggaagcaggccatccaagagaaagccgagcggaggtatcgactcactccgagcaatcccatggatctttgcttggacacaaacgcggttccacctcccggtctggctaggatttggagccgcattcaagaatgtcctccagaaggacatcaggaacctccacatgctccaggaaatgtacaatgagtggccatttttcagggtgactattgatctggtggagatggtgttcgccaagggtaatcctggcattgccgcactgtatgacaaactcctcgtttcagaggaactgcatccattgggtgagaagctgagggccaactatgaggaaacccagaagcttctacttcaggttgctgggcacagggatcttctggaaggtgacctctacctgaagcagcggctccgcctgcgtgatgcgtacatcaccaccctgaacgtctgccaggcctacaccctgaagcggatccgtgacccggactaccatgtcgcgctgcgcccccacctctccaaggagatcatggactcgaccaaggctgcggcggacgtggtgaagctgaaccctggcagcgaatacgcaccggggctggaggacaccctcatcctgaccatgaagggcatagcagccggcctccagaacaccggttaa

SEQ ID NO: 30 - DNA, 2883 bp, Zea mays
atgccggagcggcaccagtccatcgacgcgcagctgcggctgctggcccccgggaaggtctccgaggacgacaagctcgtcgagtacgacgccctcctcgtcgaccgcttcctcgacatcctccaggacctgcacggcccccacctgcgcgaattcgtgcaggagtgctacgagctctcggcggagtacgagaacgaccgggatgaggctcggcttggcgagctcgggagcaagctcaccagcctgccgccgggggactccattgtcgtcgccagctccttctcgcacatgctcaacctcgctaacctcgccgaggaagtgcagatcgcgcaccgtcgccggatcaagctaaagcggggagacttcgccgacgaggcctccgcgccgacggagtcggacatcgaggagacgctcaagcgcctcgtctctcagctcggcaagtcgcgggaggaggtcttcgacgcgctcaagaaccagaccgtcgacctcgttttcaccgcccaccctacacagtccgtgaggaggtctcttctccagaagcatggaaggatccgtaactgcctgaggcagctttatgccaaggacatcactgctgacgacaagcaggagcttgatgaggcacttcagagggagattcaagctgctttcagaactgatgaaatccgcagaacccctcccactcctcaagatgaaatgcgtgctggaatgagttacttccatgaaactatatggaagggtgtaccaaaattcttgcgccgtattgacaccgctctgaaaaatattgggatcaatgaacgtctcccttacaatgctcctctcattcagttctcttcctggatgggtggtgatcgtgatggaaatccaagagtaacaccagaggttacacgggatgtatgcttgttggcgagaatgatggctgctaacttgtacttctctcagattgaagatttaatgtttgagctgtctatgtggcgctgcagtgatgaacttcggatccgtgcagatgaactacatcgctcttcaagaaaagctgcaaagcactatatagaattctggaagcaagttccgccaaatgaaccatatcgtgtcatacttggtgatgtcagggataaattgtactacacacgtgaacgttctcgtcacctattgacatctggaatttctgagattctagaggaggcaacttttactaatgttgaacagtttctggaacctcttgagctctgttatagatcattatgtgcttgtggtgacaaacctatagctgatggaagtcttcttgatttcttgcgtcaagtatcaacttttgggcttgcccttgtgaagctcgacatcaggcaggaatctgatcgacacactgatgtccttgattcgataacgacacatcttggaattggctcctatgctgaatggtctgaggagaaacgccaggattggctgttgtctgaactgaggggcaaacgtccattgtttggttcagatcttcctcagactgaagagactgctgatgttttaggcacatttcatgtccttgcagagcttcctgcagattgctttggcgcgtatatcatctctatggcaactgccccatccgatgtgcttgcggtcgagcttttgcagcgtgagtgccatgtaaaacatccactgagagttgttccactttttgagaaacttgcagatcttgaagcagctccagcagctgtagcacggctcttttcaattgactggtacatggataggattaatggcaagcaggaggtcatgattggatattcagactctggcaaagatgccgggcgtctctctgcagcatggcaaatgtataaagcacaagaagagctcatcaaagtggcaaagcattatggagtcaagttgacaatgtttcatgggaggggtggaacagttggcagaggaggtggtccaactcatctggccatattatctcagccaccagacacgatacatggatcacttcgtgtaacagttcaaggcgaagttattgagcactcctttggagaggagctcttgtgcttcagaactttgcaacgctacactgcagctactcttgagcatggcatgcatcctccgatttcccctaagccagaatggcgtgctctgatggatgaaatggctgttgtagcaactaaagaatatcgatcaattgtcttccaagaaccacgcttcgttgaatacttcagatcggctacacctgagactgaatatggtaggatgaatattggcagccgtccatcaaagaggaagcctagtgggggaatagaatcactccgtgcaattccatggatctttgcttggacacaaacaaggttccatctgcctgtctggcttggatttggtgcagcgataaagcacatcatgcagaaggacatcaggaacatccatatactgagagaaatgtacaatgagtggccattcttcagggtcacccttgatttgcttgagatggttttcgcgaagggagacccgggaatcgcagctgtgtacgacaaattgctagtggctgatgatttgcaatccttcggcgagcaactgaggaagaactatgaggagacaaaagagctactccttcaggttgctggtcacaaggacgtccttgaaggtgatccttatctgaagcagcgtctgcggctgcgtgagtcctacatcaccactctgaacgtgtgccaggcctacaccctgaagcggatacgcgacccgagcttccaggtgagcccgcagccgcccctgtccaaggagttcaccgacgagagtcagccggcggagctggtgcagctgaaccagcagagcgagtacgctccaggcctggaggacaccctcatcctgaccatgaagggcatcgccgccggcatgcagaacaccggctag

SEQ ID NO: 31 - DNA, 4476 bp, artificial
  ZmPEPC MOD1
atggcgtcgaccaaggctcccggccccggcgagaagcaccactccatcgacgcgcagctccgtcagctggtcccaggcaaggtctccgaggacgacaagctcatcgagtacgatgcgctgctcgtcgaccgcttcctcaacatcctccaggacctccacgggcccagccttcgcgaatttgtaactaaccactgccgccgcccatttcttcttcgaccggttgccgcctgcgcgcggcactgctcgtacgtctccccgccagtgcttactgtaatgcatgcatgcaggtccaggagtgctacgaggtctcagccgactacgagggcaaaggagacacgacgaagctgggcgagctcggcgccaagctcacggggctggcccccgccgacgccatcctcgtggcgagctccatcctgcacatgctcaacctcgccaacctcgccgaggaggtgcagatcgcgcgccgccgccgcaacagcaagctcaagaaaggtgggttcgccgacgagggctccgccaccaccgagtccgacatcgaggagacgctcaagcgcctcgtgtccgaggtcggcaagtcccccgaggaggtgttcgaggcgctcaagaaccagaccatcgacctcgtcttcaccgcgcatcccacacagtccgcccgccgctcgctcctgcaaaaaaatgccgggtatatatttttcaatggcttgatcgatatgctactcacgttatatacccttaagtcttaaccattattattatttttgataaataaaaatgtcggtcttgtcgctgcaggatccggaattgtctgacccagctgaatgccaaggacatcactgacgacgacaagcaggagctcgatgaggctctgcagagagaggtacgtacatattacatttcacaccagggaatgcaagaactttatcaagagacattcattctttgatagagatagaatagaacacatgcacagtacacgtggactcatgagcttgcaagacatcgagcacgacacgtgtaagttagtgcgccagagaaatcttcaatttatatgtcaagtcaggtcaggttctcccattaaaacacatataaataaatattcattattatcaagctaaggtaataaacaaccaaacttttccactatttaaactgtctttgcaaactccaaagtagaaactaacctaatcaggaaagaactagactgcacatttatgttttaacaatgcaatgagagaactgctacatgtataacagaattatttatatgaggccgacttgacttaagattcaatgttgaagaccacttgatgaaaactacactgaattatttatatgctattctccagctgtgctcaaagcattttccttttacttaaaaaagatcattttgtacaaagatctcttactcatatagagccatttgagtagaacttcggtaccacagatgcattaatggtttagttgtaatcaagttgttgtactcatcattatattttcctaacaagtagggcatccagtttctccttgatgaggaatcaaacctagatagccttaactccacaccctcaattagctaggctatgctcaagttcctagtgttacaaatttcagacgagtcataatgtcatcactgagcactcggtaaagagcgtctctctcatggtgcatatatatgatgcagaccacctgagaagtttactgcttcaagccaccaaagtggtatttttgttgtttgggttgtttagttctaattccttttcttgggtgttcacagatccaagcagccttcagaaccgatgaaatcaggagggcacaacccaccccccaggacgaaatgcgctatgggatgagctacatccatgagactgtatggaagggcgtgcctaagttcttgcgccgtgtggatacagccctgaagaatatcggcatcaatgagcgccttccctacaatgtttctctcattcggttctcttcttggatgggtggtgaccgcgatggtacatttctgcctacccttttcaataaagtggcaggagctctctgtctttcagcttgagagaaaccttcctgctttactctgactgcaatagatgttcagaaaaactagtctatcatttcgagctctcaggagctagaattttaaaatagaaattatttagtacacctcactaataaaaatttatcatccatacatgctagcacaacatataagcataatttaatcaaatctttatattgcaacctggaacctaacttgttgaattttttatatcacagaattatacgtgtagtattattttatatatcaaagagtgcttatattatatcagtacttgtcctgtcaatattcaaggctaacgtttttcttttctcgccagaaaattatatatacagaattatatgttttttctaagcctgtatatctttgcaatctatcgctatataggaaatccaagagttaccccggaggtgacaagagatgtatgcttgctggccagaatgatggctgcaaacttgtacatcgatcagattgaagagctgatgtttgagctctctatgtggcgctgcaacgatgagcttcgtgttcgtgccgaagagctccagagttcggctggttccaaagttaccaagtattacatagaattctggaagcaaattcctccaaacgagccctaccgggtgatactaggccatgtaagggacaagctgtacaacacacgcgagcgtgctcgccatctgctggcatctggagtttctgaaatttcagcggaatcgtcatttaccagtatcgaagagttccttgagccacttgagctgtgctacaaatcactgtgtgactgcggcgacaaggccatcgcggacgggagcctcctggacctcctgcgccaggtgttcacgttcgggctctccctggtgaagctggacatccggcaggagtcggagcggcacaccgacgtgatcgacgccatcaccacgcacctcggcatcgggtcgtaccgcgagtggtccgaggacaagaggcaggagtggctgctgtcggagctgaagggcaagcgcccgctgctgcccccggaccttccccagaccgacgagatcgccgacgtcatcggcgcgttccacgtcctcgcggagctcccgcccgacagcttcggcccctacatcatctctatggcgacggccccctcggacgtgctcgccgtagagctcctgcagcgcgagtgcggcatcaagcagccgctgcccgtggtgccgctgttcgagaggctggccgacctgcagtcggcgcccgcgtccgtggagcgcctcttctcggtggactggtacatggaccggatcaagggcaagcagcaggtcatggtcggctactccgactccggcaaggacgccggccgcctgtccgcggcgtggcagctgtacagggcgcaggaggagatggcgcaggtggccaagcgctacggcgtcaagctcaccttgttccacggccgcggaggcaccgtgggcaggggtggcgggcccacgcaccttgccatcctgtcccagccgccggacaccatcaacgggtccatccgtgtgacggtgcagggcgaggtcatcgagttctgcttcggggaggagcacctgtgcttccagactctgcagcgcttcacggccgccacgctggagcacggcatgcacccgccggtctctcccaagcccgagtggcgcaagctcatggacgagatggcggtcgtggccacggaggagtaccgctcggtcgtcgtcaaggagccgcgcttcgtcgagtacttcagatcggctacaccggagaccgagtacgggaggatgaacatcggcagccggccagccaagaggaggcccggcggcggcatcacgaccctgcgcgccatcccctggatcttctcgtggactcagaccaggttccaccttcccgtgtggctgggagtcggcgccgcattcaagtgggccatcgacaaggacgtcaagaacttccaggtcctcaaagagatgtacaacgagtggccattcttcagggtcaccctggacctgctggagatggttttcgccaagggagaccccggcattgccggcttgtatgacgagctgcttgtggcggaagaactcaagccctttgggaagcagctcagggacaaatacgtggagacacagcagcttctcctccagatcgctgggcacaaggatattcttgaaggcgatccatacctgaagcaggggctggtgctgcgcaacccctacatcaccaccctgaacgtgttccaggcctacacgctgaagcggataagggaccccaacttcaaggtgacgccccagccgccgctgtccaaggagttcgccgacgagaacaagcccgccggactggtcaagctgaacccggcgagcgagtacccgcccggcctggaagacacgctcatcctcaccatgaagggcatcgccgccggcatgcagaacactggctag

SEQ ID NO: 32 - protein, 435 aa, artificial
  ZMRCA1 MOD1 protein
MYMYMHHASTDHQASTPTRSSFLGKKLNKPQVSSAAVTYHGKSSSSNSRFKAMAAKEVDETKQSDQDRWKGLAYDISDDQQDITRGKGMVDNLFQAPTGDGTHVAVLSSYDYISQGQKSYNFDNMMDGFYIAKGFMDKLVVHLSKNFMTLPNIKVPLILGIWGGKGQGKSFQCELVFAKMGITPITMSAGELESGNAGEPAKLIRQRYREAADIIKKGKMSCLFINDLDAGAGRMGGTTQYTVNNQMVNATLMNIADNPTNVQLPGMYNKVDNARVPIIVTGNDFSTLYAPLIRDGRMEKFYWAPTREDRIGICKGIFRTDGVDEEHVVQLVDTFPGQSIDFFGALRARVYDDEVRKWVAETGVENIARKLVNSKEGPPTFEQPKITIEKLLEYGHMLVAEQENVKRVQLADKYLNEAALGEANEDAMKTGSFFK

SEQ ID NO: 33 - protein, 435 aa, artificial
  ZMRCA1 MOD2 protein
MYMYMHHASTDHQASTPTRSSFLGKKLNKPQVSSAAVTYHGKSSSSNSRFKAMAAKEVDETKQSDQDRWKGLAYDISDDQQDITRGKGLVDNLFQAPTGDGTHVAVLSSYDYISQGQKTYNFDNMMDGFYISKSFMDKLVVHLSKNFMSLPNIKVPLILGIWGGKGQGKSFQCELVFSKMGIIPIMMSAGELESGNAGEPAKLIRQRYREAADLIKKGKMSCLFINDLDAGAGRMGGTTQYTVNNQMVNATLMNIADNPTNVRLPGMYNKEDNPRVPIIVTGNDFSTLYAPLIRDGRMEKFYWAPTREDRIGICKGIFRTDGVDEEHVVRLVDTFPGQSIDFFGALRARVYDDEVRKWVSETGVENIAKKLVNSKEGPPTFEQPKMTIEKLLEYGHMLVAEQENVKRVQLADKYLNEAALGEANEDAMKTGSFFK

SEQ ID NO: 34 - protein, 435 aa, artificial
  ZMRCA1 MOD3
MYMYMHHASTDHQASTPTRSSFLGKKLNKPQVSSAAVTYHGKSSSSNSRFKAMAAKEVDETKQSDQDRWKGLAYDVSDDQQDITRGKGLVDNLFQAPTGDGTHVAVLSSYDYISQGQKSYDFDNMMDGFYIAKSFMDKLVVHLSKNFMSLPNIKVPLILGIWGGKGQGKSFQCELVFAKMGITPIMMSAGELESGNAGEPAKLIRQRYREAADTIKKGKMSCLFINDLDAGAGRMGGTTQYTVNNQMVNATLMNIADNPTNVRLPGMYNKEDNPRVPIIVTGNDFSTLYAPLIRDGRMEKFYWAPTREDRIGVCKGIFRTDGVDEEHVVRLVDTFPGQSIDFFGALRARVYDDEVRKWVSETGVENIAKKLVNSKEGPPTFEQPKITIEKLLEYGHMLVAEQENVKRVQLADKYLNEAALGEANEDAMKTGSFFK

SEQ ID NO: 35 - protein, 433 aa, Zea mays
MAAAFSSTVGAPASTPTRSSFLGKKLNKPQVSAAVTYHGKSSSSNSRFKAMAAKEVDETKQTDEDRWKGLAYDISDDQQDITRGKGLVDNLFQAPMGDGTHVAVLSSYDYISQGQKSYNFDNMMDGFYIAKGFMDKLVVHLSKNFMTLPNIKVPLILGIWGGKGQGKSFQCELVFAKMGITPIMMSAGELESGNAGEPAKLIRQRYREASDLIKKGKMSCLFINDLDAGAGRMGGTTQYTVNNQMVNATLMNIADNPTNVQLPGMYNKEDNPRVPIIVTGNDFSTLYAPLIRDGRMEKFYWAPTREDRIGVCKGIFRTDGVDEEHVVQLVDTFPGQSIDFFGALRARVYDDEVRRWVSETGVENIARKLVNSKEGPPTFEQPKITIEKLLEYGHMLVAEQENVKRVQLADKYLNEAALGEANEDAMKTGSFFK

SEQ ID NO: 36 - protein, 970 aa, artificial
  ZMPEPC MOD1
MASTKAPGPGEKHHSIDAQLRQLVPGKVSEDDKLIEYDALLVDRFLNILQDLHGPSLREFVQECYEVSADYEGKGDTTKLGELGAKLTGLAPADAILVASSILHMLNLANLAEEVQIARRRRNSKLKKGGFADEGSATTESDIEETLKRLVSEVGKSPEEVFEALKNQTIDLVFTAHPTQSARRSLLQKNAGIRNCLTQLNAKDITDDDKQELDEALQREIQAAFRTDEIRRAQPTPQDEMRYGMSYIHETVWKGVPKFLRRVDTALKNIGINERLPYNVSLIRFSSWMGGDRDGNPRVTPEVTRDVCLLARMMAANLYIDQIEELMFELSMWRCNDELRVRAEELQSSAGSKVTKYYIEFWKQIPPNEPYRVILGHVRDKLYNTRERARHLLASGVSEISAESSFTSIEEFLEPLELCYKSLCDCGDKAIADGSLLDLLRQVFTFGLSLVKLDIRQESERHTDVIDAITTHLGIGSYREWSEDKRQEWLLSELKGKRPLLPPDLPQTDEIADVIGAFHVLAELPPDSFGPYIISMATAPSDVLAVELLQRECGIKQPLPVVPLFERLADLQSAPASVERLFSVDWYMDRIKGKQQVMVGYSDSGKDAGRLSAAWQLYRAQEEMAQVAKRYGVKLTLFHGRGGTVGRGGGPTHLAILSQPPDTINGSIRVTVQGEVIEFCFGEEHLCFQTLQRFTAATLEHGMHPPVSPKPEWRKLMDEMAVVATEEYRSVVVKEPRFVEYFRSATPETEYGRMNIGSRPAKRRPGGGITTLRAIPWIFSWTQTRFHLPVWLGVGAAFKWAIDKDVKNFQVLKEMYNEWPFFRVTLDLLEMVFAKGDPGIAGLYDELLVAEELKPFGKQLRDKYVETQQLLLQIAGHKDILEGDPYLKQGLVLRNPYITTLNVFQAYTLKRIRDPNFKVTPQPPLSKEFADENKPAGLVKLNPASEYPPGLEDTLILTMKGIAAGMQNTG

SEQ ID NO: 37 - protein, 970 aa, artificial
  ZMPEPC MOD2
MASTKAPGPGEKHHSIDAQLRQLVPGKVSEDDKLIEYDALLVDRFLNILQDLHGPSLREFVQECYEVSADYEGKGDTTKLGELGAKLTGLAPADAILVASSILHMLNLANLAEEVQIARRRRNSKLKKGGFADEGSATTESDIEETLKRLVSEVGKSPEEVFEALKNQTIDLVFTAHPTQSARRSLLQKNAGIRNCLTQLNAKDITDDDKQELDEALQREIQAAFRTDEIRRAQPTPQDEMRYGMSYIHETVWKGVPKFLRRVDTALKNIGINERLPYNVSLIRFSSWMGGDRDGNPRVTPEVTRDVCLLARMMAANLYIDQIEELMFELSMWRCNDELRVRAEELHSSSGSKVTKYYIEFWKQIPPNEPYRVILGHVRDKLYNTRERARHLLASGVSEISAESSFTSIEEFLEPLELCYKSLCDCGDKAIADGSLLDLLRQVFTFGLSLVKLDIRQESERHTDVIDAITTHLGIGSYREWSEDKRQEWLLSELRGKRPLLPPDLPQTDEIADVIGAFHVLAELPPDSFGPYIISMATAPSDVLAVELLQRECGIKQPLPVVPLFERLADLQSAPASVERLFSVDWYMDRIKGKQQVMVGYSDSGKDAGRLSAAWQLYKAQEEMAQVAKRYGVKLTLFHGRGGTVGRGGGPTHLAILSQPPDTINGSIRVTVQGEVIEFCFGEEHLCFQTLQRFTAATLEHGMHPPVSPKPEWRKLMDEMAVVATEEYRSVVVKEPRFVEYFRSATPETEYGRMNIGSRPAKRRPGGGITTLRAIPWIFSWTQTRFHLPVWLGVGAAFKFAIDKDVRNFQVLKEMYNEWPFFRVTLDLLEMIFAKGDPGIAGLYDELLVAEELKPFGKQLRDKYVETQQLLLQIAGHKDILEGDPFLKQGLVLRNPYITTLNVFQAYTLKRIRDPNFKVTPQPPLSKEFADENKPAGLVKLNPASEYPPGLEDTLILTMKGIAAGMQNTG

SEQ ID NO: 38 - protein, 970 aa, artificial
  ZMPEPC MOD3
MASTKAPGPGEKHHSIDAQLRQLVPGKVSEDDKLIEYDALLVDRFLNILQDLHGPSLREFVQECYEVSADYEGKGDTTKLGELGAKLTGLAPADAILVASSILHMLNLANLAEEVQIARRRRNSKLKKGGFADEGSATTESDIEETLKRLVSEVGKSPEEVFEALKNQTIDLVFTAHPTQSARRSLLQKNAGIRNCLTQLNAKDITDDDKQELDEALQREIQAAFRTDEIRRAQPTPQDEMRYGMSYIHETVWKGVPKFLRRVDTALKNIGINERLPYNVSLIRFSSWMGGDRDGNPRVTPEVTRDVCLLARMMAANLYIDQIEELMFELSMWRCNDELRVRAEELHSSSGSKVTKYYIEFWKQIPPNEPYRVILGHVRDKLYNTRERARHLLASGVSEISAEASFTSIEEFLEPLELCYKSLCDCGDKAIADGSLLDLLRQVFTFGLSLVKLDIRQESERHTDVIDAITTHLGIGSYREWSEDKRQEWLLSELKGKRPLLPPDLPQTDEIADVIGAFHVLAELPPDSFGPYIISMATAPSDVLAVELLQRECGVRQPLPVVPLFERLADLQSAPASVERLFSVDWYMDRIKGKQQVMVGYSDSGKDAGRLSAAWQLYKAQEEMAQVAKRYGVKLTLFHGRGGTVGRGGGPTHLAILSQPPDTINGSIRVTVQGEVIEFCFGEEHLCFQTLQRFTAATLEHGMHPPVSPKPEWRKLMDEMAVVATEEYRSVVVKEPRFVEYFRSATPETEYGRMNIGSRPAKRRPGGGITTLRAIPWIFSWTQTRFHLPVWLGVGAAFKFAIDKDVKNFQVLKEMYNEWPFFRVTLDLLEMVFAKGDPGIAGLYDELLVAEELKPFGKQLRDKYVETQQLLLQIAGHKDILEGDPFLKQGLVLRNPYITTLNVFQAYTLKRIRDPNFKVTPQPPLSKEFADENKPAGLVKLNPASEYPPGLEDTLILTMKGIAAGMQNTG

SEQ ID NO: 39 - protein, 970 aa, Zea mays
MASTKAPGPGEKHHSIDAQLRQLVPGKVSEDDKLIEYDALLVDRFLNILQDLHGPSLREFVQECYEVSADYEGKGDTTKLGELGAKLTGLAPADAILVASSILHMLNLANLAEEVQIAHRRRNSKLKKGGFADEGSATTESDIEETLKRLVSEVGKSPEEVFEALKNQTVDLVFTAHPTQSARRSLLQKNARIRNCLTQLNAKDITDDDKQELDEALQREIQAAFRTDEIRRAQPTPQDEMRYGMSYIHETVWKGVPKFLRRVDTALKNIGINERLPYNVSLIRFSSWMGGDRDGNPRVTPEVTRDVCLLARMMAANLYIDQIEELMFELSMWRCNDELRVRAEELHSSSGSKVTKYYIEFWKQIPPNEPYRVILGHVRDKLYNTRERARHLLASGVSEISAESSFTSIEEFLEPLELCYKSLCDCGDKAIADGSLLDLLRQVFTFGLSLVKLDIRQESERHTDVIDAITTHLGIGSYREWSEDKRQEWLLSELRGKRPLLPPDLPQTDEIADVIGAFHVLAELPPDSFGPYIISMATAPSDVLAVELLQRECGVRQPLPVVPLFERLADLQSAPASVERLFSVDWYMDRIKGKQQVMVGYSDSGKDAGRLSAAWQLYRAQEEMAQVAKRYGVKLTLFHGRGGTVGRGGGPTHLAILSQPPDTINGSIRVTVQGEVIEFCFGEEHLCFQTLQRFTAATLEHGMHPPVSPKPEWRKLMDEMAVVATEEYRSVVVKEPRFVEYFRSATPETEYGRMNIGSRPAKRRPGGGITTLRAIPWIFSWTQTRFHLPVWLGVGAAFKFAIDKDVRNFQVLKEMYNEWPFFRVTLDLLEMVFAKGDPGIAGLYDELLVAEELKPFGKQLRDKYVETQQLLLQIAGHKDILEGDPFLKQGLVLRNPYITTLNVFQAYTLKRIRDPNFKVTPQPPLSKEFADENKPAGLVKLNPASEYPPGLEDTLILTMKGIAAGMQNTG

That which is claimed:

1. A polynucleotide construct comprising
(a) a first element comprising a recombinant expression construct comprising a polynucleotide of interest having at least 80% sequence identity to a target sequence; and,
(b) a second element comprising a recombinant miRNA expression construct,
wherein said recombinant miRNA expression construct encodes a miRNA consisting of 21 nucleotides (21-nt) and wherein said miRNA when expressed in a plant cell reduces the level of mRNA of the target sequence without reducing the level of mRNA of said first element.

2. The polynucleotide construct of claim 1, wherein said encoded miRNA corresponds to a complement of a region of the mRNA of the target sequence, wherein said region has 3 or fewer non-complementary nucleotides to said 21-nt miRNA; and,
wherein said miRNA comprises 5 or more non-complementary nucleotides to any given region across the length of the mRNA encoded by the polynucleotide of interest.

3. The polynucleotide construct of claim 2, wherein said complement of a region of the mRNA of the target sequence comprises
(a) 2 non-complementary nucleotides to said 21-nt miRNA;
(b) 1 non-complementary nucleotide to said 21-nt miRNA; or
(c) 100% sequence complementarity to said 21-nt miRNA.

4. The polynucleotide construct of any one of claims 1-3, wherein the target sequence is endogenous to said plant cell.

5. The polynucleotide construct of any one of claims 1-4, wherein
(a) said first element comprises a first promoter operably linked to said sequence encoding the polynucleotide of interest; and
(b) said second element comprises a second promoter operably linked to said sequence encoding the recombinant miRNA expression construct;
wherein said first and second promoters are active in a plant.

6. The polynucleotide construct of any one of claims 1-4, wherein said first element and said second element are operably linked to the same promoter.

7. The polynucleotide construct of any one of claims 1-6, wherein said polynucleotide of interest is a shuffled variant of the target sequence.

8. The polynucleotide construct of claim 7, wherein said target sequence encodes a member of the phosphoenolpyruvate carboxylase protein family.

9. The polynucleotide construct of claim 7, wherein said target sequence encodes RUBISCO Activase 1.

10. A transformed plant cell comprising:
(a) a recombinant expression construct comprising a polynucleotide of interest having at least 80% sequence identity when compared to an endogenous target sequence expressed in said plant cell; and,
(b) a recombinant miRNA expression construct capable of being transcribed into an RNA sequence in said plant cell,
wherein said recombinant miRNA expression construct encodes a miRNA consisting of 21 nucleotides (21-nt) and wherein said miRNA when expressed in said plant cell reduces the level of mRNA of said endogenous target sequence without reducing the level of mRNA of said polynucleotide of interest.

11. The transformed plant cell of claim 10, wherein said encoded miRNA corresponds to a complement of a region of the mRNA of the target sequence, wherein said region has 3 or fewer non-complementary nucleotides to said 21-nt miRNA; and,
wherein said miRNA comprises 5 or more non-complementary nucleotides to any given region across the length of the mRNA encoded by the polynucleotide of interest.

12. The transformed plant cell of claim 11, wherein said complement of a region of the mRNA of the target sequence comprises
(a) 2 non-complementary nucleotides to said 21-nt miRNA;
(b) 1 non-complementary nucleotide to said 21-nt miRNA; or
(c) 100% sequence complementarity to said 21-nt miRNA.

13. The transformed plant cell of any one of claims 10-12, wherein said recombinant expression construct comprising the polynucleotide of interest and said recombinant miRNA expression construct are integrated into the genome of the plant cell on the same polynucleotide construct.

14. The transformed plant cell of any one of claims 10-12, wherein said recombinant expression construct and said recombinant miRNA expression construct are integrated into the genome of the plant cell on different polynucleotide constructs.

15. The transformed plant cell of any one of claims 10-14, wherein said polynucleotide of interest is a shuffled variant of the target sequence.

16. The transformed plant cell of claim 15, wherein said target sequence encodes a member of the phosphoenolpyruvate carboxylase protein family.

17. The transformed plant cell of claim 15, wherein said target sequence encodes RUBISCO Activase 1.

18. A plant comprising the transformed plant cell of any one of claims 10-17.

19. A transgenic seed comprising the transformed plant cell of any one of claims 10-17.

20. The transformed plant cell of any one of claims 10-17, wherein said plant cell is from a dicot.

21. The transformed plant cell of claim 20, wherein said dicot is soybean, Brassica, sunflower, cotton, or alfalfa.

22. The transformed plant cell of any one of claims 10-17, wherein said plant cell is from a monocot.

23. The transformed plant cell of claim 22, wherein said monocot is maize, sugarcane, wheat, rice, barley, sorghum, or rye.

24. A method of reducing the level of mRNA of a target sequence in a plant cell comprising introducing into a plant cell
(a) a recombinant expression construct comprising a polynucleotide of interest having at least 80% sequence identity to an endogenous target sequence operably linked to a promoter active in the plant cell; and
(b) a recombinant miRNA expression construct, wherein said recombinant miRNA expression construct encodes a miRNA consisting of 21 nucleotides (21-nt);
wherein the level of mRNA of said endogenous target sequence is reduced relative to the level of mRNA of the endogenous target sequence in the absence of transcription of said recombinant miRNA expression construct, and wherein the level of mRNA of said polynucleotide of interest is not reduced relative to the level of mRNA of said polynucleotide of interest in the absence of transcription of said recombinant miRNA expression construct.

25. The method of claim 24, wherein said recombinant expression construct comprising said polynucleotide of interest and said recombinant miRNA expression construct are introduced into said plant cell on the same polynucleotide construct.

26. The method of claim 24, wherein said recombinant expression construct comprising said polynucleotide of interest and said recombinant miRNA expression construct are introduced into said plant cell on different polynucleotide constructs.

27. The method of any one of claims 24-26, wherein said encoded miRNA corresponds to a complement of a region of the mRNA of the target sequence, wherein said region has 3 or fewer non-complementary nucleotides to said 21-nt miRNA; and,
wherein said miRNA comprises 5 or more non-complementary nucleotides to any given region across the length of the mRNA encoded by the polynucleotide of interest.

28. The method of claim 27, wherein said complement of a region of the mRNA of the target sequence comprises
(a) 2 non-complementary nucleotides to said 21-nt miRNA;
(b) 1 non-complementary nucleotide to said 21-nt miRNA; or
(c) 100% sequence complementarity to said 21-nt miRNA.

29. The method of any one of claims 24-28, wherein
(a) said recombinant expression construct comprises said polynucleotide of interest operably linked to a first promoter; and
(b) said sequence encoding said recombinant miRNA expression construct is operably linked to a second promoter,
wherein said first and second promoters are active in a plant.

30. The method of any one of claims 24-28, wherein said recombinant expression construct and said recombinant miRNA expression construct are operably linked to the same promoter.

31. The method of any one of claims 24-30, wherein said polynucleotide of interest is a shuffled variant of the target sequence.

32. The method of claim 31, wherein said target sequence encodes a member of the phosphoenolpyruvate carboxylase protein family.

33. The method of claim 31, wherein said target sequence encodes RUBISCO Activase 1.

34. The method of any one of claims 24-33, wherein said plant cell is from a dicot.

35. The method of claim 34, wherein said dicot is soybean, Brassica, sunflower, cotton, or alfalfa.

36. The method of any one of claims 24-33, wherein said plant cell is from a monocot.

37. The method of claim 36, wherein said monocot is maize, sugarcane, wheat, rice, barley, sorghum, or rye.
